United States Patent Application Publication US 2026/0317771 A1, published October 15, 2026 (application 19/685,709).

The application's sequence listing, which the Patent Office published only in electronic form, follows.

SEQUENCE LISTING (1623 sequences)

SEQ ID NO: 1 - RNA, 3243 nt, Homo sapiens
  source 1..3243: mol_type = mRNA
gccacaagcctccaccccagctggtcccccacccaggctgcccagtttaacattcctagtcataggaccttgacttctgagaggcctgattgtcatctgtaaataaggggtaggactaaagcactcctcctggaggactgagagatgggctggaccggagcacttgagtctgggatatgtgaccatgctacctttgtctccctgtcctgttccttcccccagccccaaatccagggttttccaaagtgtggttcaagaaccacctgcatctgaatctagaggtactggatacaaccccacgtctgggccgttacccaggacattctacatgagaacgtgggggtggggccctggctgcacctgaactgtcacctggagtcagggtggaaggtggaagaactgggtcttatttccttctccccttgttctttagggtctgtccttctgcagactccgttaccccaccctaaccatcctgcacacccttggagccctctgggccaatgccctgtcccgcaaagggcttctcaggcatctcacctctatgggagggcatttttggcccccagaaccttacacggtgtttatgtggggaagcccctgggaagcagacagtcctagggtgaagctgagaggcagagagaaggggagacagacagagggtggggctttcccccttgtctccagtgccctttctggtgaccctcggttcttttcccccaccacccccccagcggagcccatcgtggtgaggcttaaggaggtccgactgcagagggacgacttcgagattctgaaggtgatcggacgcggggcgttcagcgaggtagcggtagtgaagatgaagcagacgggccaggtgtatgccatgaagatcatgaacaagtgggacatgctgaagaggggcgaggtgtcgtgcttccgtgaggagagggacgtgttggtgaatggggaccggcggtggatcacgcagctgcacttcgccttccaggatgagaactacctgtacctggtcatggagtattacgtgggcggggacctgctgacactgctgagcaagtttggggagcggattccggccgagatggcgcgcttctacctggcggagattgtcatggccatagactcggtgcaccggcttggctacgtgcacagggacatcaaacccgacaacatcctgctggaccgctgtggccacatccgcctggccgacttcggctcttgcctcaagctgcgggcagatggaacggtgcggtcgctggtggctgtgggcaccccagactacctgtcccccgagatcctgcaggctgtgggcggtgggcctgggacaggcagctacgggcccgagtgtgactggtgggcgctgggtgtattcgcctatgaaatgttctatgggcagacgcccttctacgcggattccacggcggagacctatggcaagatcgtccactacaaggagcacctctctctgccgctggtggacgaaggggtccctgaggaggctcgagacttcattcagcggttgctgtgtcccccggagacacggctgggccggggtggagcaggcgacttccggacacatcccttcttctttggcctcgactgggatggtctccgggacagcgtgcccccctttacaccggatttcgaaggtgccaccgacacatgcaacttcgacttggtggaggacgggctcactgccatggtgagcgggggcggggagacactgtcggacattcgggaaggtgcgccgctaggggtccacctgccttttgtgggctactcctactcctgcatggccctcagggacagtgaggtcccaggccccacacccatggaactggaggccgagcagctgcttgagccacacgtgcaagcgcccagcctggagccctcggtgtccccacaggatgaaacagctgaagtggcagttccagcggctgtccctgcggcagaggctgaggccgaggtgacgctgcgggagctccaggaagccctggaggaggaggtgctcacccggcagagcctgagccgggagatggaggccatccgcacggacaaccagaacttcgccagtcaactacgcgaggcagaggctcggaaccgggacctagaggcacacgtccggcagttgcaggagcggatggagttgctgcaggcagagggagccacagctgtcacgggggtccccagtccccgggccacggatccaccttcccatctagatggccccccggccgtggctgtgggccagtgcccgctggtggggccaggccccatgcaccgccgccacctgctgctccctgccagggtccctaggcctggcctatcggaggcgctttccctgctcctgttcgccgttgttctgtctcgtgccgccgccctgggctgcattgggttggtggcccacgccggccaactcaccgcagtctggcgccgcccaggagccgcccgcgctccctgaaccctagaactgtcttcgactccggggccccgttggaagactgagtgcccggggcacggcacagaagccgcgcccaccgcctgccagttcacaaccgctccgagcgtgggtctccgcccagctccagtcctgtgatccgggcccgccccctagcggccggggagggaggggccgggtccgcggccggcgaacggggctcgaagggtccttgtagccgggaatgctgctgctgctgctgctgctgctgctgctgctgctgctgctgctgctgctgctgctgctggggggatcacagaccatttctttctttcggccaggctgaggccctgacgtggatgggcaaactgcaggcctgggaaggcagcaagccgggccgtccgtgttccatcctccacgcacccccacctatcgttggttcgcaaagtgcaaagctttcttgtgcatgacgccctgctctggggagcgtctggcgcgatctctgcctgcttactcgggaaatttgcttttgccaaacccgctttttcggggatcccgcgcccccctcctcacttgcgctgctctcggagccccagccggctccgcccgcttcggcggtttggatatttattgacctcgtcctccgactcgctgacaggctacaggacccccaacaaccccaatccacgttttggatgcactgagaccccgacattcctcggtatttattgtctgtccccacctaggacccccacccccgaccctcgcgaataaaaggccctccatctgcccaaagctctgga

SEQ ID NO: 2 - RNA, 19 nt, synthetic construct
  source 1..19: mol_type = other RNA
gcgaggtagcggtagtgaa

SEQ ID NO: 3 - RNA, 19 nt, synthetic construct
  source 1..19: mol_type = other RNA
ccatgaagatcatgaacaa

SEQ ID NO: 4 - RNA, 19 nt, synthetic construct
  source 1..19: mol_type = other RNA
atgaagatcatgaacaagt

SEQ ID NO: 5 - RNA, 19 nt, synthetic construct
  source 1..19: mol_type = other RNA
tgaagatcatgaacaagtg

SEQ ID NO: 6 - RNA, 19 nt, synthetic construct
  source 1..19: mol_type = other RNA
aagtgggacatgctgaaga

SEQ ID NO: 7 - RNA, 19 nt, synthetic construct
  source 1..19: mol_type = other RNA
agtgggacatgctgaagag

SEQ ID NO: 8 - RNA, 19 nt, synthetic construct
  source 1..19: mol_type = other RNA
gggcgaggtgtcgtgcttc

SEQ ID NO: 9 - RNA, 19 nt, synthetic construct
  source 1..19: mol_type = other RNA
gggacgtgttggtgaatgg

SEQ ID NO: 10 - RNA, 19 nt, synthetic construct
  source 1..19: mol_type = other RNA
gcacttcgccttccaggat

SEQ ID NO: 11 - RNA, 19 nt, synthetic construct
  source 1..19: mol_type = other RNA
tccaggatgagaactacct

SEQ ID NO: 12 - RNA, 19 nt, synthetic construct
  source 1..19: mol_type = other RNA
caggatgagaactacctgt

SEQ ID NO: 13 - RNA, 19 nt, synthetic construct
  source 1..19: mol_type = other RNA
gatgagaactacctgtacc

SEQ ID NO: 14 - RNA, 19 nt, synthetic construct
  source 1..19: mol_type = other RNA
atgagaactacctgtacct

SEQ ID NO: 15 - RNA, 19 nt, synthetic construct
  source 1..19: mol_type = other RNA
acctgtacctggtcatgga

SEQ ID NO: 16 - RNA, 19 nt, synthetic construct
  source 1..19: mol_type = other RNA
tggtcatggagtattacgt

SEQ ID NO: 17 - RNA, 19 nt, synthetic construct
  source 1..19: mol_type = other RNA
ctgacactgctgagcaagt

SEQ ID NO: 18 - RNA, 19 nt, synthetic construct
  source 1..19: mol_type = other RNA
acactgctgagcaagtttg

SEQ ID NO: 19 - RNA, 19 nt, synthetic construct
  source 1..19: mol_type = other RNA
actgctgagcaagtttggg

SEQ ID NO: 20 - RNA, 19 nt, synthetic construct
  source 1..19: mol_type = other RNA
acatcaaacccgacaacat

SEQ ID NO: 21 - RNA, 19 nt, synthetic construct
  source 1..19: mol_type = other RNA
atcaaacccgacaacatcc

SEQ ID NO: 22 - RNA, 19 nt, synthetic construct
  source 1..19: mol_type = other RNA
aaacccgacaacatcctgc

SEQ ID NO: 23 - RNA, 19 nt, synthetic construct
  source 1..19: mol_type = other RNA
cagacgcccttctacgcgg

SEQ ID NO: 24 - RNA, 19 nt, synthetic construct
  source 1..19: mol_type = other RNA
gcaagatcgtccactacaa

SEQ ID NO: 25 - RNA, 19 nt, synthetic construct
  source 1..19: mol_type = other RNA
agatcgtccactacaagga

SEQ ID NO: 26 - RNA, 19 nt, synthetic construct
  source 1..19: mol_type = other RNA
acaaggagcacctctctct

SEQ ID NO: 27 - RNA, 19 nt, synthetic construct
  source 1..19: mol_type = other RNA
gacacatcccttcttcttt

SEQ ID NO: 28 - RNA, 19 nt, synthetic construct
  source 1..19: mol_type = other RNA
cacatcccttcttctttgg

SEQ ID NO: 29 - RNA, 19 nt, synthetic construct
  source 1..19: mol_type = other RNA
cctttacaccggatttcga

SEQ ID NO: 30 - RNA, 19 nt, synthetic construct
  source 1..19: mol_type = other RNA
tttacaccggatttcgaag

SEQ ID NO: 31 - RNA, 19 nt, synthetic construct
  source 1..19: mol_type = other RNA
caccggatttcgaaggtgc

SEQ ID NO: 32 - RNA, 19 nt, synthetic construct
  source 1..19: mol_type = other RNA
ccgacacatgcaacttcga

SEQ ID NO: 33 - RNA, 19 nt, synthetic construct
  source 1..19: mol_type = other RNA
gacacatgcaacttcgact

SEQ ID NO: 34 - RNA, 19 nt, synthetic construct
  source 1..19: mol_type = other RNA
acacatgcaacttcgactt

SEQ ID NO: 35 - RNA, 19 nt, synthetic construct
  source 1..19: mol_type = other RNA
atgcaacttcgacttggtg

SEQ ID NO: 36 - RNA, 19 nt, synthetic construct
  source 1..19: mol_type = other RNA
atgaaacagctgaagtggc

SEQ ID NO: 37 - RNA, 19 nt, synthetic construct
  source 1..19: mol_type = other RNA
cctgaaccctagaactgtc

SEQ ID NO: 38 - RNA, 19 nt, synthetic construct
  source 1..19: mol_type = other RNA
aaccctagaactgtcttcg

SEQ ID NO: 39 - RNA, 19 nt, synthetic construct
  source 1..19: mol_type = other RNA
accctagaactgtcttcga

SEQ ID NO: 40 - RNA, 19 nt, synthetic construct
  source 1..19: mol_type = other RNA
ccctagaactgtcttcgac

SEQ ID NO: 41 - RNA, 19 nt, synthetic construct
  source 1..19: mol_type = other RNA
cctagaactgtcttcgact

SEQ ID NO: 42 - RNA, 19 nt, synthetic construct
  source 1..19: mol_type = other RNA
ctagaactgtcttcgactc

SEQ ID NO: 43 - RNA, 19 nt, synthetic construct
  source 1..19: mol_type = other RNA
gcttactcgggaaatttgc

SEQ ID NO: 44 - RNA, 19 nt, synthetic construct
  source 1..19: mol_type = other RNA
cttactcgggaaatttgct

SEQ ID NO: 45 - RNA, 19 nt, synthetic construct
  source 1..19: mol_type = other RNA
tcgggaaatttgcttttgc

SEQ ID NO: 46 - RNA, 19 nt, synthetic construct
  source 1..19: mol_type = other RNA
ggaaatttgcttttgccaa

SEQ ID NO: 47 - RNA, 19 nt, synthetic construct
  source 1..19: mol_type = other RNA
aaatttgcttttgccaaac

SEQ ID NO: 48 - RNA, 19 nt, synthetic construct
  source 1..19: mol_type = other RNA
ggcggtttggatatttatt

SEQ ID NO: 49 - RNA, 19 nt, synthetic construct
  source 1..19: mol_type = other RNA
gcggtttggatatttattg

SEQ ID NO: 50 - RNA, 19 nt, synthetic construct
  source 1..19: mol_type = other RNA
ggtttggatatttattgac

SEQ ID NO: 51 - RNA, 19 nt, synthetic construct
  source 1..19: mol_type = other RNA
ccccaatccacgttttgga

SEQ ID NO: 52 - RNA, 19 nt, synthetic construct
  source 1..19: mol_type = other RNA
cccaatccacgttttggat

SEQ ID NO: 53 - RNA, 19 nt, synthetic construct
  source 1..19: mol_type = other RNA
caatccacgttttggatgc

SEQ ID NO: 54 - RNA, 19 nt, synthetic construct
  source 1..19: mol_type = other RNA
tccacgttttggatgcact

SEQ ID NO: 55 - RNA, 19 nt, synthetic construct
  source 1..19: mol_type = other RNA
gttttggatgcactgagac

SEQ ID NO: 56 - RNA, 19 nt, synthetic construct
  source 1..19: mol_type = other RNA
ttttggatgcactgagacc

SEQ ID NO: 57 - RNA, 19 nt, synthetic construct
  source 1..19: mol_type = other RNA
ccgacattcctcggtattt

SEQ ID NO: 58 - RNA, 19 nt, synthetic construct
  source 1..19: mol_type = other RNA
attcctcggtatttattgt

SEQ ID NO: 59 - RNA, 19 nt, synthetic construct
  source 1..19: mol_type = other RNA
tcctcggtatttattgtct

SEQ ID NO: 60 - RNA, 19 nt, synthetic construct
  source 1..19: mol_type = other RNA
cctcggtatttattgtctg

SEQ ID NO: 61 - RNA, 19 nt, synthetic construct
  source 1..19: mol_type = other RNA
tcggtatttattgtctgtc

SEQ ID NO: 62 - RNA, 19 nt, synthetic construct
  source 1..19: mol_type = other RNA
cggtatttattgtctgtcc

SEQ ID NO: 63 - RNA, 19 nt, synthetic construct
  source 1..19: mol_type = other RNA
ttgtctgtccccacctagg

SEQ ID NO: 64 - RNA, 19 nt, synthetic construct
  source 1..19: mol_type = other RNA
ccctcgcgaataaaaggcc

SEQ ID NO: 65 - RNA, 19 nt, synthetic construct
  source 1..19: mol_type = other RNA
ttcactaccgctacctcgc

SEQ ID NO: 66 - RNA, 19 nt, synthetic construct
  source 1..19: mol_type = other RNA
atcactaccgctacctcgc

SEQ ID NO: 67 - RNA, 19 nt, synthetic construct
  source 1..19: mol_type = other RNA
ntcactaccgctacctcgc

SEQ ID NO: 68 - RNA, 19 nt, synthetic construct
  source 1..19: mol_type = other RNA
ntcactaccgctacctcgn

SEQ ID NO: 69 - RNA, 19 nt, synthetic construct
  source 1..19: mol_type = other RNA
ttgttcatgatcttcatgg

SEQ ID NO: 70 - RNA, 19 nt, synthetic construct
  source 1..19: mol_type = other RNA
atgttcatgatcttcatgg

SEQ ID NO: 71 - RNA, 19 nt, synthetic construct
  source 1..19: mol_type = other RNA
ntgttcatgatcttcatgg

SEQ ID NO: 72 - RNA, 19 nt, synthetic construct
  source 1..19: mol_type = other RNA
ntgttcatgatcttcatgn

SEQ ID NO: 73 - RNA, 19 nt, synthetic construct
  source 1..19: mol_type = other RNA
acttgttcatgatcttcat

SEQ ID NO: 74 - RNA, 19 nt, synthetic construct
  source 1..19: mol_type = other RNA
tcttgttcatgatcttcat

SEQ ID NO: 75 - RNA, 19 nt, synthetic construct
  source 1..19: mol_type = other RNA
ncttgttcatgatcttcat

SEQ ID NO: 76 - RNA, 19 nt, synthetic construct
  source 1..19: mol_type = other RNA
ncttgttcatgatcttcan

SEQ ID NO: 77 - RNA, 19 nt, synthetic construct
  source 1..19: mol_type = other RNA
cacttgttcatgatcttca

SEQ ID NO: 78 - RNA, 19 nt, synthetic construct
  source 1..19: mol_type = other RNA
tacttgttcatgatcttca

SEQ ID NO: 79 - RNA, 19 nt, synthetic construct
  source 1..19: mol_type = other RNA
aacttgttcatgatcttca

SEQ ID NO: 80 - RNA, 19 nt, synthetic construct
  source 1..19: mol_type = other RNA
nacttgttcatgatcttca

SEQ ID NO: 81 - RNA, 19 nt, synthetic construct
  source 1..19: mol_type = other RNA
nacttgttcatgatcttcn

SEQ ID NO: 82 - RNA, 19 nt, synthetic construct
  source 1..19: mol_type = other RNA
tcttcagcatgtcccactt

SEQ ID NO: 83 - RNA, 19 nt, synthetic construct
  source 1..19: mol_type = other RNA
acttcagcatgtcccactt

SEQ ID NO: 84 - RNA, 19 nt, synthetic construct
  source 1..19: mol_type = other RNA
ncttcagcatgtcccactt

SEQ ID NO: 85 - RNA, 19 nt, synthetic construct
  source 1..19: mol_type = other RNA
ncttcagcatgtcccactn

SEQ ID NO: 86 - RNA, 19 nt, synthetic construct
  source 1..19: mol_type = other RNA
ctcttcagcatgtcccact

SEQ ID NO: 87 - RNA, 19 nt, synthetic construct
  source 1..19: mol_type = other RNA
ttcttcagcatgtcccact

SEQ ID NO: 88 - RNA, 19 nt, synthetic construct
  source 1..19: mol_type = other RNA
atcttcagcatgtcccact

SEQ ID NO: 89 - RNA, 19 nt, synthetic construct
  source 1..19: mol_type = other RNA
ntcttcagcatgtcccact

SEQ ID NO: 90 - RNA, 19 nt, synthetic construct
  source 1..19: mol_type = other RNA
ntcttcagcatgtcccacn

SEQ ID NO: 91 - RNA, 19 nt, synthetic construct
  source 1..19: mol_type = other RNA
gaagcacgacacctcgccc

SEQ ID NO: 92 - RNA, 19 nt, synthetic construct
  source 1..19: mol_type = other RNA
taagcacgacacctcgccc

SEQ ID NO: 93 - RNA, 19 nt, synthetic construct
  source 1..19: mol_type = other RNA
aaagcacgacacctcgccc

SEQ ID NO: 94 - RNA, 19 nt, synthetic construct
  source 1..19: mol_type = other RNA
naagcacgacacctcgccc

SEQ ID NO: 95 - RNA, 19 nt, synthetic construct
  source 1..19: mol_type = other RNA
naagcacgacacctcgccn

SEQ ID NO: 96 - RNA, 19 nt, synthetic construct
  source 1..19: mol_type = other RNA
ccattcaccaacacgtccc

SEQ ID NO: 97 - RNA, 19 nt, synthetic construct
  source 1..19: mol_type = other RNA
tcattcaccaacacgtccc

SEQ ID NO: 98 - RNA, 19 nt, synthetic construct
  source 1..19: mol_type = other RNA
acattcaccaacacgtccc

SEQ ID NO: 99 - RNA, 19 nt, synthetic construct
  source 1..19: mol_type = other RNA
ncattcaccaacacgtccc

SEQ ID NO: 100 - RNA, 19 nt, synthetic construct
  source 1..19: mol_type = other RNA
ncattcaccaacacgtccn

SEQ ID NO: 101 - RNA, 19 nt, synthetic construct
  source 1..19: mol_type = other RNA
atcctggaaggcgaagtgc

SEQ ID NO: 102 - RNA, 19 nt, synthetic construct
  source 1..19: mol_type = other RNA
ttcctggaaggcgaagtgc

SEQ ID NO: 103 - RNA, 19 nt, synthetic construct
  source 1..19: mol_type = other RNA
ntcctggaaggcgaagtgc

SEQ ID NO: 104 - RNA, 19 nt, synthetic construct
  source 1..19: mol_type = other RNA
ntcctggaaggcgaagtgn

SEQ ID NO: 105 - RNA, 19 nt, synthetic construct
  source 1..19: mol_type = other RNA
aggtagttctcatcctgga

SEQ ID NO: 106 - RNA, 19 nt, synthetic construct
  source 1..19: mol_type = other RNA
tggtagttctcatcctgga

SEQ ID NO: 107 - RNA, 19 nt, synthetic construct
  source 1..19: mol_type = other RNA
nggtagttctcatcctgga

SEQ ID NO: 108 - RNA, 19 nt, synthetic construct
  source 1..19: mol_type = other RNA
nggtagttctcatcctggn

SEQ ID NO: 109 - RNA, 19 nt, synthetic construct
  source 1..19: mol_type = other RNA
acaggtagttctcatcctg

SEQ ID NO: 110 - RNA, 19 nt, synthetic construct
  source 1..19: mol_type = other RNA
tcaggtagttctcatcctg

SEQ ID NO: 111 - RNA, 19 nt, synthetic construct
  source 1..19: mol_type = other RNA
ncaggtagttctcatcctg

SEQ ID NO: 112 - RNA, 19 nt, synthetic construct
  source 1..19: mol_type = other RNA
ncaggtagttctcatcctn

SEQ ID NO: 113 - RNA, 19 nt, synthetic construct
  source 1..19: mol_type = other RNA
ggtacaggtagttctcatc

SEQ ID NO: 114 - RNA, 19 nt, synthetic construct
  source 1..19: mol_type = other RNA
tgtacaggtagttctcatc

SEQ ID NO: 115 - RNA, 19 nt, synthetic construct
  source 1..19: mol_type = other RNA
agtacaggtagttctcatc

SEQ ID NO: 116 - RNA, 19 nt, synthetic construct
  source 1..19: mol_type = other RNA
ngtacaggtagttctcatc

SEQ ID NO: 117 - RNA, 19 nt, synthetic construct
  source 1..19: mol_type = other RNA
ngtacaggtagttctcatn

SEQ ID NO: 118 - RNA, 19 nt, synthetic construct
  source 1..19: mol_type = other RNA
aggtacaggtagttctcat

SEQ ID NO: 119 - RNA, 19 nt, synthetic construct
  source 1..19: mol_type = other RNA
tggtacaggtagttctcat

SEQ ID NO: 120 - RNA, 19 nt, synthetic construct
  source 1..19: mol_type = other RNA
nggtacaggtagttctcat

SEQ ID NO: 121 - RNA, 19 nt, synthetic construct
  source 1..19: mol_type = other RNA
nggtacaggtagttctcan

SEQ ID NO: 122 - RNA, 19 nt, synthetic construct
  source 1..19: mol_type = other RNA
tccatgaccaggtacaggt

SEQ ID NO: 123 - RNA, 19 nt, synthetic construct
  source 1..19: mol_type = other RNA
accatgaccaggtacaggt

SEQ ID NO: 124 - RNA, 19 nt, synthetic construct
  source 1..19: mol_type = other RNA
nccatgaccaggtacaggt

SEQ ID NO: 125 - RNA, 19 nt, synthetic construct
  source 1..19: mol_type = other RNA
nccatgaccaggtacaggn

SEQ ID NO: 126 - RNA, 19 nt, synthetic construct
  source 1..19: mol_type = other RNA
acgtaatactccatgacca

SEQ ID NO: 127 - RNA, 19 nt, synthetic construct
  source 1..19: mol_type = other RNA
tcgtaatactccatgacca

SEQ ID NO: 128 - RNA, 19 nt, synthetic construct
  source 1..19: mol_type = other RNA
ncgtaatactccatgacca

SEQ ID NO: 129 - RNA, 19 nt, synthetic construct
  source 1..19: mol_type = other RNA
ncgtaatactccatgaccn

SEQ ID NO: 130 - RNA, 19 nt, synthetic construct
  source 1..19: mol_type = other RNA
acttgctcagcagtgtcag

SEQ ID NO: 131 - RNA, 19 nt, synthetic construct
  source 1..19: mol_type = other RNA
tcttgctcagcagtgtcag

SEQ ID NO: 132 - RNA, 19 nt, synthetic construct
  source 1..19: mol_type = other RNA
ncttgctcagcagtgtcag

SEQ ID NO: 133 - RNA, 19 nt, synthetic construct
  source 1..19: mol_type = other RNA
ncttgctcagcagtgtcan

SEQ ID NO: 134 - RNA, 19 nt, synthetic construct
  source 1..19: mol_type = other RNA
caaacttgctcagcagtgt

SEQ ID NO: 135 - RNA, 19 nt, synthetic construct
  source 1..19: mol_type = other RNA
taaacttgctcagcagtgt

SEQ ID NO: 136 - RNA, 19 nt, synthetic construct
  source 1..19: mol_type = other RNA
aaaacttgctcagcagtgt

SEQ ID NO: 137 - RNA, 19 nt, synthetic construct
  source 1..19: mol_type = other RNA
naaacttgctcagcagtgt

SEQ ID NO: 138 - RNA, 19 nt, synthetic construct
  source 1..19: mol_type = other RNA
naaacttgctcagcagtgn

SEQ ID NO: 139 - RNA, 19 nt, synthetic construct
  source 1..19: mol_type = other RNA
cccaaacttgctcagcagt

SEQ ID NO: 140 - RNA, 19 nt, synthetic construct
  source 1..19: mol_type = other RNA
tccaaacttgctcagcagt

SEQ ID NO: 141 - RNA, 19 nt, synthetic construct
  source 1..19: mol_type = other RNA
accaaacttgctcagcagt

SEQ ID NO: 142 - RNA, 19 nt, synthetic construct
  source 1..19: mol_type = other RNA
nccaaacttgctcagcagt

SEQ ID NO: 143 - RNA, 19 nt, synthetic construct
  source 1..19: mol_type = other RNA
nccaaacttgctcagcagn

SEQ ID NO: 144 - RNA, 19 nt, synthetic construct
  source 1..19: mol_type = other RNA
atgttgtcgggtttgatgt

SEQ ID NO: 145 - RNA, 19 nt, synthetic construct
  source 1..19: mol_type = other RNA
ttgttgtcgggtttgatgt

SEQ ID NO: 146 - RNA, 19 nt, synthetic construct
  source 1..19: mol_type = other RNA
ntgttgtcgggtttgatgt

SEQ ID NO: 147 - RNA, 19 nt, synthetic construct
  source 1..19: mol_type = other RNA
ntgttgtcgggtttgatgn

SEQ ID NO: 148 - RNA, 19 nt, synthetic construct
  source 1..19: mol_type = other RNA
ggatgttgtcgggtttgat

SEQ ID NO: 149 - RNA, 19 nt, synthetic construct
  source 1..19: mol_type = other RNA
tgatgttgtcgggtttgat

SEQ ID NO: 150 - RNA, 19 nt, synthetic construct
  source 1..19: mol_type = other RNA
agatgttgtcgggtttgat

SEQ ID NO: 151 - RNA, 19 nt, synthetic construct
  source 1..19: mol_type = other RNA
ngatgttgtcgggtttgat

SEQ ID NO: 152 - RNA, 19 nt, synthetic construct
  source 1..19: mol_type = other RNA
ngatgttgtcgggtttgan

SEQ ID NO: 153 - RNA, 19 nt, synthetic construct
  source 1..19: mol_type = other RNA
gcaggatgttgtcgggttt

SEQ ID NO: 154 - RNA, 19 nt, synthetic construct
  source 1..19: mol_type = other RNA
tcaggatgttgtcgggttt

SEQ ID NO: 155 - RNA, 19 nt, synthetic construct
  source 1..19: mol_type = other RNA
acaggatgttgtcgggttt

SEQ ID NO: 156 - RNA, 19 nt, synthetic construct
  source 1..19: mol_type = other RNA
ncaggatgttgtcgggttt

SEQ ID NO: 157 - RNA, 19 nt, synthetic construct
  source 1..19: mol_type = other RNA
ncaggatgttgtcgggttn

SEQ ID NO: 158 - RNA, 19 nt, synthetic construct
  source 1..19: mol_type = other RNA
ccgcgtagaagggcgtctg

SEQ ID NO: 159 - RNA, 19 nt, synthetic construct
  source 1..19: mol_type = other RNA
tcgcgtagaagggcgtctg

SEQ ID NO: 160 - RNA, 19 nt, synthetic construct
  source 1..19: mol_type = other RNA
acgcgtagaagggcgtctg

SEQ ID NO: 161 - RNA, 19 nt, synthetic construct
  source 1..19: mol_type = other RNA
ncgcgtagaagggcgtctg

SEQ ID NO: 162 - RNA, 19 nt, synthetic construct
  source 1..19: mol_type = other RNA
ncgcgtagaagggcgtctn

SEQ ID NO: 163 - RNA, 19 nt, synthetic construct
  source 1..19: mol_type = other RNA
ttgtagtggacgatcttgc

SEQ ID NO: 164 - RNA, 19 nt, synthetic construct
  source 1..19: mol_type = other RNA
atgtagtggacgatcttgc

SEQ ID NO: 165 - RNA, 19 nt, synthetic construct
  source 1..19: mol_type = other RNA
ntgtagtggacgatcttgc

SEQ ID NO: 166 - RNA, 19 nt, synthetic construct
  source 1..19: mol_type = other RNA
ntgtagtggacgatcttgn

SEQ ID NO: 167 - RNA, 19 nt, synthetic construct
  source 1..19: mol_type = other RNA
tccttgtagtggacgatct

SEQ ID NO: 168 - RNA, 19 nt, synthetic construct
  source 1..19: mol_type = other RNA
accttgtagtggacgatct

SEQ ID NO: 169 - RNA, 19 nt, synthetic construct
  source 1..19: mol_type = other RNA
nccttgtagtggacgatct

SEQ ID NO: 170 - RNA, 19 nt, synthetic construct
  source 1..19: mol_type = other RNA
nccttgtagtggacgatcn

SEQ ID NO: 171 - RNA, 19 nt, synthetic construct
  source 1..19: mol_type = other RNA
agagagaggtgctccttgt

SEQ ID NO: 172 - RNA, 19 nt, synthetic construct
  source 1..19: mol_type = other RNA
tgagagaggtgctccttgt

SEQ ID NO: 173 - RNA, 19 nt, synthetic construct
  source 1..19: mol_type = other RNA
ngagagaggtgctccttgt

SEQ ID NO: 174 - RNA, 19 nt, synthetic construct
  source 1..19: mol_type = other RNA
ngagagaggtgctccttgn

SEQ ID NO: 175 - RNA, 19 nt, synthetic construct
  source 1..19: mol_type = other RNA
aaagaagaagggatgtgtc

SEQ ID NO: 176 - RNA, 19 nt, synthetic construct
  source 1..19: mol_type = other RNA
taagaagaagggatgtgtc

SEQ ID NO: 177 - RNA, 19 nt, synthetic construct
  source 1..19: mol_type = other RNA
naagaagaagggatgtgtc

SEQ ID NO: 178 - RNA, 19 nt, synthetic construct
  source 1..19: mol_type = other RNA
naagaagaagggatgtgtn

SEQ ID NO: 179 - RNA, 19 nt, synthetic construct
  source 1..19: mol_type = other RNA
ccaaagaagaagggatgtg

SEQ ID NO: 180 - RNA, 19 nt, synthetic construct
  source 1..19: mol_type = other RNA
tcaaagaagaagggatgtg

SEQ ID NO: 181 - RNA, 19 nt, synthetic construct
  source 1..19: mol_type = other RNA
acaaagaagaagggatgtg

SEQ ID NO: 182 - RNA, 19 nt, synthetic construct
  source 1..19: mol_type = other RNA
ncaaagaagaagggatgtg

SEQ ID NO: 183 - RNA, 19 nt, synthetic construct
  source 1..19: mol_type = other RNA
ncaaagaagaagggatgtn

SEQ ID NO: 184 - RNA, 19 nt, synthetic construct
  source 1..19: mol_type = other RNA
tcgaaatccggtgtaaagg

SEQ ID NO: 185 - RNA, 19 nt, synthetic construct
  source 1..19: mol_type = other RNA
acgaaatccggtgtaaagg

SEQ ID NO: 186 - RNA, 19 nt, synthetic construct
  source 1..19: mol_type = other RNA
ncgaaatccggtgtaaagg

SEQ ID NO: 187 - RNA, 19 nt, synthetic construct
  source 1..19: mol_type = other RNA
ncgaaatccggtgtaaagn

SEQ ID NO: 188 - RNA, 19 nt, synthetic construct
  source 1..19: mol_type = other RNA
cttcgaaatccggtgtaaa

SEQ ID NO: 189 - RNA, 19 nt, synthetic construct
  source 1..19: mol_type = other RNA
tttcgaaatccggtgtaaa

SEQ ID NO: 190 - RNA, 19 nt, synthetic construct
  source 1..19: mol_type = other RNA
attcgaaatccggtgtaaa

SEQ ID NO: 191 - RNA, 19 nt, synthetic construct
  source 1..19: mol_type = other RNA
nttcgaaatccggtgtaaa

SEQ ID NO: 192 - RNA, 19 nt, synthetic construct
  source 1..19: mol_type = other RNA
nttcgaaatccggtgtaan

SEQ ID NO: 193 - RNA, 19 nt, synthetic construct
  source 1..19: mol_type = other RNA
ccaccttcgaaatccggtg

SEQ ID NO: 194 - RNA, 19 nt, synthetic construct
  source 1..19: mol_type = other RNA
tcaccttcgaaatccggtg

SEQ ID NO: 195 - RNA, 19 nt, synthetic construct
  source 1..19: mol_type = other RNA
acaccttcgaaatccggtg

SEQ ID NO: 196 - RNA, 19 nt, synthetic construct
  source 1..19: mol_type = other RNA
ncaccttcgaaatccggtg

SEQ ID NO: 197 - RNA, 19 nt, synthetic construct
  source 1..19: mol_type = other RNA
ncaccttcgaaatccggtn

SEQ ID NO: 198 - RNA, 19 nt, synthetic construct
  source 1..19: mol_type = other RNA
tcgaagttgcatgtgtcgg

SEQ ID NO: 199 - RNA, 19 nt, synthetic construct
  source 1..19: mol_type = other RNA
acgaagttgcatgtgtcgg

SEQ ID NO: 200 - RNA, 19 nt, synthetic construct
  source 1..19: mol_type = other RNA
ncgaagttgcatgtgtcgg

SEQ ID NO: 201 - RNA, 19 nt, synthetic construct
  source 1..19: mol_type = other RNA
ncgaagttgcatgtgtcgn

SEQ ID NO: 202 - RNA, 19 nt, synthetic construct
  source 1..19: mol_type = other RNA
agtcgaagttgcatgtgtc

SEQ ID NO: 203 - RNA, 19 nt, synthetic construct
  source 1..19: mol_type = other RNA
tgtcgaagttgcatgtgtc

SEQ ID NO: 204 - RNA, 19 nt, synthetic construct
  source 1..19: mol_type = other RNA
ngtcgaagttgcatgtgtc

SEQ ID NO: 205 - RNA, 19 nt, synthetic construct
  source 1..19: mol_type = other RNA
ngtcgaagttgcatgtgtn

SEQ ID NO: 206 - RNA, 19 nt, synthetic construct
  source 1..19: mol_type = other RNA
aagtcgaagttgcatgtgt

SEQ ID NO: 207 - RNA, 19 nt, synthetic construct
  source 1..19: mol_type = other RNA
tagtcgaagttgcatgtgt

SEQ ID NO: 208 - RNA, 19 nt, synthetic construct
  source 1..19: mol_type = other RNA
nagtcgaagttgcatgtgt

SEQ ID NO: 209 - RNA, 19 nt, synthetic construct
  source 1..19: mol_type = other RNA
nagtcgaagttgcatgtgn

SEQ ID NO: 210 - RNA, 19 nt, synthetic construct
  source 1..19: mol_type = other RNA
caccaagtcgaagttgcat

SEQ ID NO: 211 - RNA, 19 nt, synthetic construct
  source 1..19: mol_type = other RNA
taccaagtcgaagttgcat

SEQ ID NO: 212 - RNA, 19 nt, synthetic construct
  source 1..19: mol_type = other RNA
aaccaagtcgaagttgcat

SEQ ID NO: 213 - RNA, 19 nt, synthetic construct
  source 1..19: mol_type = other RNA
naccaagtcgaagttgcat

SEQ ID NO: 214 - RNA, 19 nt, synthetic construct
  source 1..19: mol_type = other RNA
naccaagtcgaagttgcan

SEQ ID NO: 215 - RNA, 19 nt, synthetic construct
  source 1..19: mol_type = other RNA
gccacttcagctgtttcat

SEQ ID NO: 216 - RNA, 19 nt, synthetic construct
  source 1..19: mol_type = other RNA
tccacttcagctgtttcat

SEQ ID NO: 217 - RNA, 19 nt, synthetic construct
  source 1..19: mol_type = other RNA
accacttcagctgtttcat

SEQ ID NO: 218 - RNA, 19 nt, synthetic construct
  source 1..19: mol_type = other RNA
nccacttcagctgtttcat

SEQ ID NO: 219 - RNA, 19 nt, synthetic construct
  source 1..19: mol_type = other RNA
nccacttcagctgtttcan

SEQ ID NO: 220 - RNA, 19 nt, synthetic construct
  source 1..19: mol_type = other RNA
gacagttctagggttcagg

SEQ ID NO: 221 - RNA, 19 nt, synthetic construct
  source 1..19: mol_type = other RNA
tacagttctagggttcagg

SEQ ID NO: 222 - RNA, 19 nt, synthetic construct
  source 1..19: mol_type = other RNA
aacagttctagggttcagg

SEQ ID NO: 223 - RNA, 19 nt, synthetic construct
  source 1..19: mol_type = other RNA
nacagttctagggttcagg

SEQ ID NO: 224 - RNA, 19 nt, synthetic construct
  source 1..19: mol_type = other RNA
nacagttctagggttcagn

SEQ ID NO: 225 - RNA, 19 nt, synthetic construct
  source 1..19: mol_type = other RNA
cgaagacagttctagggtt

SEQ ID NO: 226 - RNA, 19 nt, synthetic construct
  source 1..19: mol_type = other RNA
tgaagacagttctagggtt

SEQ ID NO: 227 - RNA, 19 nt, synthetic construct
  source 1..19: mol_type = other RNA
agaagacagttctagggtt

SEQ ID NO: 228 - RNA, 19 nt, synthetic construct
  source 1..19: mol_type = other RNA
ngaagacagttctagggtt

SEQ ID NO: 229 - RNA, 19 nt, synthetic construct
  source 1..19: mol_type = other RNA
ngaagacagttctagggtn

SEQ ID NO: 230 - RNA, 19 nt, synthetic construct
  source 1..19: mol_type = other RNA
tcgaagacagttctagggt

SEQ ID NO: 231 - RNA, 19 nt, synthetic construct
  source 1..19: mol_type = other RNA
acgaagacagttctagggt

SEQ ID NO: 232 - RNA, 19 nt, synthetic construct
  source 1..19: mol_type = other RNA
ncgaagacagttctagggt

SEQ ID NO: 233 - RNA, 19 nt, synthetic construct
  source 1..19: mol_type = other RNA
ncgaagacagttctagggn

SEQ ID NO: 234 - RNA, 19 nt, synthetic construct
  source 1..19: mol_type = other RNA
gtcgaagacagttctaggg

SEQ ID NO: 235 - RNA, 19 nt, synthetic construct
  source 1..19: mol_type = other RNA
ttcgaagacagttctaggg

SEQ ID NO: 236 - RNA, 19 nt, synthetic construct
  source 1..19: mol_type = other RNA
atcgaagacagttctaggg

SEQ ID NO: 237 - RNA, 19 nt, synthetic construct
  source 1..19: mol_type = other RNA
ntcgaagacagttctaggg

SEQ ID NO: 238 - RNA, 19 nt, synthetic construct
  source 1..19: mol_type = other RNA
ntcgaagacagttctaggn

SEQ ID NO: 239 - RNA, 19 nt, synthetic construct
  source 1..19: mol_type = other RNA
agtcgaagacagttctagg

SEQ ID NO: 240 - RNA, 19 nt, synthetic construct
  source 1..19: mol_type = other RNA
tgtcgaagacagttctagg

SEQ ID NO: 241 - RNA, 19 nt, synthetic construct
  source 1..19: mol_type = other RNA
ngtcgaagacagttctagg

SEQ ID NO: 242 - RNA, 19 nt, synthetic construct
  source 1..19: mol_type = other RNA
ngtcgaagacagttctagn

SEQ ID NO: 243 - RNA, 19 nt, synthetic construct
  source 1..19: mol_type = other RNA
gagtcgaagacagttctag

SEQ ID NO: 244 - RNA, 19 nt, synthetic construct
  source 1..19: mol_type = other RNA
tagtcgaagacagttctag

SEQ ID NO: 245 - RNA, 19 nt, synthetic construct
  source 1..19: mol_type = other RNA
aagtcgaagacagttctag

SEQ ID NO: 246 - RNA, 19 nt, synthetic construct
  source 1..19: mol_type = other RNA
nagtcgaagacagttctag

SEQ ID NO: 247 - RNA, 19 nt, synthetic construct
  source 1..19: mol_type = other RNA
nagtcgaagacagttctan

SEQ ID NO: 248 - RNA, 19 nt, synthetic construct
  source 1..19: mol_type = other RNA
gcaaatttcccgagtaagc

SEQ ID NO: 249 - RNA, 19 nt, synthetic construct
  source 1..19: mol_type = other RNA
tcaaatttcccgagtaagc

SEQ ID NO: 250 - RNA, 19 nt, synthetic construct
  source 1..19: mol_type = other RNA
acaaatttcccgagtaagc

SEQ ID NO: 251 - RNA, 19 nt, synthetic construct
  source 1..19: mol_type = other RNA
ncaaatttcccgagtaagc

SEQ ID NO: 252 - RNA, 19 nt, synthetic construct
  source 1..19: mol_type = other RNA
ncaaatttcccgagtaagn

SEQ ID NO: 253 - RNA, 19 nt, synthetic construct
  source 1..19: mol_type = other RNA
agcaaatttcccgagtaag

SEQ ID NO: 254 - RNA, 19 nt, synthetic construct
  source 1..19: mol_type = other RNA
tgcaaatttcccgagtaag

SEQ ID NO: 255 - RNA, 19 nt, synthetic construct
  source 1..19: mol_type = other RNA
ngcaaatttcccgagtaag

SEQ ID NO: 256 - RNA, 19 nt, synthetic construct
  source 1..19: mol_type = other RNA
ngcaaatttcccgagtaan

SEQ ID NO: 257 - RNA, 19 nt, synthetic construct
  source 1..19: mol_type = other RNA
gcaaaagcaaatttcccga

SEQ ID NO: 258 - RNA, 19 nt, synthetic construct
  source 1..19: mol_type = other RNA
tcaaaagcaaatttcccga

SEQ ID NO: 259 - RNA, 19 nt, synthetic construct
  source 1..19: mol_type = other RNA
acaaaagcaaatttcccga

SEQ ID NO: 260 - RNA, 19 nt, synthetic construct
  source 1..19: mol_type = other RNA
ncaaaagcaaatttcccga

SEQ ID NO: 261 - RNA, 19 nt, synthetic construct
  source 1..19: mol_type = other RNA
ncaaaagcaaatttcccgn

SEQ ID NO: 262 - RNA, 19 nt, synthetic construct
  source 1..19: mol_type = other RNA
ttggcaaaagcaaatttcc

SEQ ID NO: 263 - RNA, 19 nt, synthetic construct
  source 1..19: mol_type = other RNA
atggcaaaagcaaatttcc

SEQ ID NO: 264 - RNA, 19 nt, synthetic construct
  source 1..19: mol_type = other RNA
ntggcaaaagcaaatttcc

SEQ ID NO: 265 - RNA, 19 nt, synthetic construct
  source 1..19: mol_type = other RNA
ntggcaaaagcaaatttcn

SEQ ID NO: 266 - RNA, 19 nt, synthetic construct
  source 1..19: mol_type = other RNA
gtttggcaaaagcaaattt

SEQ ID NO: 267 - RNA, 19 nt, synthetic construct
  source 1..19: mol_type = other RNA
ttttggcaaaagcaaattt

SEQ ID NO: 268 - RNA, 19 nt, synthetic construct
  source 1..19: mol_type = other RNA
atttggcaaaagcaaattt

SEQ ID NO: 269 - RNA, 19 nt, synthetic construct
  source 1..19: mol_type = other RNA
ntttggcaaaagcaaattt

SEQ ID NO: 270 - RNA, 19 nt, synthetic construct
  source 1..19: mol_type = other RNA
ntttggcaaaagcaaattn

SEQ ID NO: 271 - RNA, 19 nt, synthetic construct
  source 1..19: mol_type = other RNA
aataaatatccaaaccgcc

SEQ ID NO: 272 - RNA, 19 nt, synthetic construct
  source 1..19: mol_type = other RNA
tataaatatccaaaccgcc

SEQ ID NO: 273 - RNA, 19 nt, synthetic construct
  source 1..19: mol_type = other RNA
nataaatatccaaaccgcc

SEQ ID NO: 274 - RNA, 19 nt, synthetic construct
  source 1..19: mol_type = other RNA
nataaatatccaaaccgcn

SEQ ID NO: 275 - RNA, 19 nt, synthetic construct
  source 1..19: mol_type = other RNA
caataaatatccaaaccgc

SEQ ID NO: 276 - RNA, 19 nt, synthetic construct
  source 1..19: mol_type = other RNA
taataaatatccaaaccgc

SEQ ID NO: 277 - RNA, 19 nt, synthetic construct
  source 1..19: mol_type = other RNA
aaataaatatccaaaccgc

SEQ ID NO: 278 - RNA, 19 nt, synthetic construct
  source 1..19: mol_type = other RNA
naataaatatccaaaccgc

SEQ ID NO: 279 - RNA, 19 nt, synthetic construct
  source 1..19: mol_type = other RNA
naataaatatccaaaccgn

SEQ ID NO: 280 - RNA, 19 nt, synthetic construct
  source 1..19: mol_type = other RNA
gtcaataaatatccaaacc

SEQ ID NO: 281 - RNA, 19 nt, synthetic construct
  source 1..19: mol_type = other RNA
ttcaataaatatccaaacc

SEQ ID NO: 282 - RNA, 19 nt, synthetic construct
  source 1..19: mol_type = other RNA
atcaataaatatccaaacc

SEQ ID NO: 283 - RNA, 19 nt, synthetic construct
  source 1..19: mol_type = other RNA
ntcaataaatatccaaacc

SEQ ID NO: 284 - RNA, 19 nt, synthetic construct
  source 1..19: mol_type = other RNA
ntcaataaatatccaaacn

SEQ ID NO: 285 - RNA, 19 nt, synthetic construct
  source 1..19: mol_type = other RNA
tccaaaacgtggattgggg

SEQ ID NO: 286 - RNA, 19 nt, synthetic construct
  source 1..19: mol_type = other RNA
accaaaacgtggattgggg

SEQ ID NO: 287 - RNA, 19 nt, synthetic construct
  source 1..19: mol_type = other RNA
nccaaaacgtggattgggg

SEQ ID NO: 288 - RNA, 19 nt, synthetic construct
  source 1..19: mol_type = other RNA
nccaaaacgtggattgggn

SEQ ID NO: 289 - RNA, 19 nt, synthetic construct
  source 1..19: mol_type = other RNA
atccaaaacgtggattggg

SEQ ID NO: 290 - RNA, 19 nt, synthetic construct
  source 1..19: mol_type = other RNA
ttccaaaacgtggattggg

SEQ ID NO: 291 - RNA, 19 nt, synthetic construct
  source 1..19: mol_type = other RNA
ntccaaaacgtggattggg

SEQ ID NO: 292 - RNA, 19 nt, synthetic construct
  source 1..19: mol_type = other RNA
ntccaaaacgtggattggn

SEQ ID NO: 293 - RNA, 19 nt, synthetic construct
  source 1..19: mol_type = other RNA
gcatccaaaacgtggattg

SEQ ID NO: 294 - RNA, 19 nt, synthetic construct
  source 1..19: mol_type = other RNA
tcatccaaaacgtggattg

SEQ ID NO: 295 - RNA, 19 nt, synthetic construct
  source 1..19: mol_type = other RNA
acatccaaaacgtggattg

SEQ ID NO: 296 - RNA, 19 nt, synthetic construct
  source 1..19: mol_type = other RNA
ncatccaaaacgtggattg

SEQ ID NO: 297 - RNA, 19 nt, synthetic construct
  source 1..19: mol_type = other RNA
ncatccaaaacgtggattn

SEQ ID NO: 298 - RNA, 19 nt, synthetic construct
  source 1..19: mol_type = other RNA
agtgcatccaaaacgtgga

SEQ ID NO: 299 - RNA, 19 nt, synthetic construct
  source 1..19: mol_type = other RNA
tgtgcatccaaaacgtgga

SEQ ID NO: 300 - RNA, 19 nt, synthetic construct
  source 1..19: mol_type = other RNA
ngtgcatccaaaacgtgga

SEQ ID NO: 301 - RNA, 19 nt, synthetic construct
  source 1..19: mol_type = other RNA
ngtgcatccaaaacgtggn

SEQ ID NO: 302 - RNA, 19 nt, synthetic construct
  source 1..19: mol_type = other RNA
gtctcagtgcatccaaaac

SEQ ID NO: 303 - RNA, 19 nt, synthetic construct
  source 1..19: mol_type = other RNA
ttctcagtgcatccaaaac

SEQ ID NO: 304 - RNA, 19 nt, synthetic construct
  source 1..19: mol_type = other RNA
atctcagtgcatccaaaac

SEQ ID NO: 305 - RNA, 19 nt, synthetic construct
  source 1..19: mol_type = other RNA
ntctcagtgcatccaaaac

SEQ ID NO: 306 - RNA, 19 nt, synthetic construct
  source 1..19: mol_type = other RNA
ntctcagtgcatccaaaan

SEQ ID NO: 307 - RNA, 19 nt, synthetic construct
  source 1..19: mol_type = other RNA
ggtctcagtgcatccaaaa

SEQ ID NO: 308 - RNA, 19 nt, synthetic construct
  source 1..19: mol_type = other RNA
tgtctcagtgcatccaaaa

SEQ ID NO: 309 - RNA, 19 nt, synthetic construct
  source 1..19: mol_type = other RNA
agtctcagtgcatccaaaa

SEQ ID NO: 310 - RNA, 19 nt, synthetic construct
  source 1..19: mol_type = other RNA
ngtctcagtgcatccaaaa

SEQ ID NO: 311 - RNA, 19 nt, synthetic construct
  source 1..19: mol_type = other RNA
ngtctcagtgcatccaaaa

SEQ ID NO: 312 - RNA, 19 nt, synthetic construct
  source 1..19: mol_type = other RNA
taataccgaggaatgtcgg

SEQ ID NO: 313 - RNA, 19 nt, synthetic construct
  source 1..19: mol_type = other RNA
aaataccgaggaatgtcgg

SEQ ID NO: 314 - RNA, 19 nt, synthetic construct
  source 1..19: mol_type = other RNA
naataccgaggaatgtcgg

SEQ ID NO: 315 - RNA, 19 nt, synthetic construct
  source 1..19: mol_type = other RNA
naataccgaggaatgtcgn

SEQ ID NO: 316 - RNA, 19 nt, synthetic construct
  source 1..19: mol_type = other RNA
acaataaataccgaggaat

SEQ ID NO: 317 - RNA, 19 nt, synthetic construct
  source 1..19: mol_type = other RNA
tcaataaataccgaggaat

SEQ ID NO: 318 - RNA, 19 nt, synthetic construct
  source 1..19: mol_type = other RNA
ncaataaataccgaggaat

SEQ ID NO: 319 - RNA, 19 nt, synthetic construct
  source 1..19: mol_type = other RNA
ncaataaataccgaggaan

SEQ ID NO: 320 - RNA, 19 nt, synthetic construct
  source 1..19: mol_type = other RNA
agacaataaataccgagga

SEQ ID NO: 321 - RNA, 19 nt, synthetic construct
  source 1..19: mol_type = other RNA
tgacaataaataccgagga

SEQ ID NO: 322 - RNA, 19 nt, synthetic construct
  source 1..19: mol_type = other RNA
ngacaataaataccgagga

SEQ ID NO: 323 - RNA, 19 nt, synthetic construct
  source 1..19: mol_type = other RNA
ngacaataaataccgaggn

SEQ ID NO: 324 - RNA, 19 nt, synthetic construct
  source 1..19: mol_type = other RNA
cagacaataaataccgagg

SEQ ID NO: 325 - RNA, 19 nt, synthetic construct
  source 1..19: mol_type = other RNA
tagacaataaataccgagg

SEQ ID NO: 326 - RNA, 19 nt, synthetic construct
  source 1..19: mol_type = other RNA
aagacaataaataccgagg

SEQ ID NO: 327 - RNA, 19 nt, synthetic construct
  source 1..19: mol_type = other RNA
nagacaataaataccgagg

SEQ ID NO: 328 - RNA, 19 nt, synthetic construct
  source 1..19: mol_type = other RNA
nagacaataaataccgagn

SEQ ID NO: 329 - RNA, 19 nt, synthetic construct
  source 1..19: mol_type = other RNA
gacagacaataaataccga

SEQ ID NO: 330 - RNA, 19 nt, synthetic construct
  source 1..19: mol_type = other RNA
tacagacaataaataccga

SEQ ID NO: 331 - RNA, 19 nt, synthetic construct
  source 1..19: mol_type = other RNA
aacagacaataaataccga

SEQ ID NO: 332 - RNA, 19 nt, synthetic construct
  source 1..19: mol_type = other RNA
nacagacaataaataccga

SEQ ID NO: 333 - RNA, 19 nt, synthetic construct
  source 1..19: mol_type = other RNA
nacagacaataaataccgn

SEQ ID NO: 334 - RNA, 19 nt, synthetic construct
  source 1..19: mol_type = other RNA
ggacagacaataaataccg

SEQ ID NO: 335 - RNA, 19 nt, synthetic construct
  source 1..19: mol_type = other RNA
tgacagacaataaataccg

SEQ ID NO: 336 - RNA, 19 nt, synthetic construct
  source 1..19: mol_type = other RNA
agacagacaataaataccg

SEQ ID NO: 337 - RNA, 19 nt, synthetic construct
  source 1..19: mol_type = other RNA
ngacagacaataaataccg

SEQ ID NO: 338 - RNA, 19 nt, synthetic construct
  source 1..19: mol_type = other RNA
ngacagacaataaataccn

SEQ ID NO: 339 - RNA, 19 nt, synthetic construct
  source 1..19: mol_type = other RNA
cctaggtggggacagacaa

SEQ ID NO: 340 - RNA, 19 nt, synthetic construct
  source 1..19: mol_type = other RNA
tctaggtggggacagacaa

SEQ ID NO: 341 - RNA, 19 nt, synthetic construct
  source 1..19: mol_type = other RNA
actaggtggggacagacaa

SEQ ID NO: 342 - RNA, 19 nt, synthetic construct
  source 1..19: mol_type = other RNA
nctaggtggggacagacaa

SEQ ID NO: 343 - RNA, 19 nt, synthetic construct
  source 1..19: mol_type = other RNA
nctaggtggggacagacan

SEQ ID NO: 344 - RNA, 19 nt, synthetic construct
  source 1..19: mol_type = other RNA
ggccttttattcgcgaggg

SEQ ID NO: 345 - RNA, 19 nt, synthetic construct
  source 1..19: mol_type = other RNA
tgccttttattcgcgaggg

SEQ ID NO: 346 - RNA, 19 nt, synthetic construct
  source 1..19: mol_type = other RNA
agccttttattcgcgaggg

SEQ ID NO: 347 - RNA, 19 nt, synthetic construct
  source 1..19: mol_type = other RNA
ngccttttattcgcgaggg

SEQ ID NO: 348 - RNA, 19 nt, synthetic construct
  source 1..19: mol_type = other RNA
ngccttttattcgcgaggn

SEQ ID NO: 349 - RNA, 19 nt, synthetic construct
  source 1..19: mol_type = other RNA
gcgaggtagcggtagtgaa

SEQ ID NO: 350 - RNA, 19 nt, synthetic construct
  source 1..19: mol_type = other RNA
gcgaggtagcggtagtgat

SEQ ID NO: 351 - RNA, 19 nt, synthetic construct
  source 1..19: mol_type = other RNA
gcgaggtagcggtagtgan

SEQ ID NO: 352 - RNA, 19 nt, synthetic construct
  source 1..19: mol_type = other RNA
ncgaggtagcggtagtgan

SEQ ID NO: 353 - RNA, 19 nt, synthetic construct
  source 1..19: mol_type = other RNA
ccatgaagatcatgaacaa

SEQ ID NO: 354 - RNA, 19 nt, synthetic construct
  source 1..19: mol_type = other RNA
ccatgaagatcatgaacat

SEQ ID NO: 355 - RNA, 19 nt, synthetic construct
  source 1..19: mol_type = other RNA
ccatgaagatcatgaacan

SEQ ID NO: 356 - RNA, 19 nt, synthetic construct
  source 1..19: mol_type = other RNA
ncatgaagatcatgaacan

SEQ ID NO: 357 - RNA, 19 nt, synthetic construct
  source 1..19: mol_type = other RNA
atgaagatcatgaacaagt

SEQ ID NO: 358 - RNA, 19 nt, synthetic construct
  source 1..19: mol_type = other RNA
atgaagatcatgaacaaga

SEQ ID NO: 359 - RNA, 19 nt, synthetic construct
  source 1..19: mol_type = other RNA
atgaagatcatgaacaagn

SEQ ID NO: 360 - RNA, 19 nt, synthetic construct
  source 1..19: mol_type = other RNA
ntgaagatcatgaacaagn

SEQ ID NO: 361 - RNA, 19 nt, synthetic construct
  source 1..19: mol_type = other RNA
tgaagatcatgaacaagtg

SEQ ID NO: 362 - RNA, 19 nt, synthetic construct
  source 1..19: mol_type = other RNA
tgaagatcatgaacaagta

SEQ ID NO: 363 - RNA, 19 nt, synthetic construct
  source 1..19: mol_type = other RNA
tgaagatcatgaacaagtt

SEQ ID NO: 364 - RNA, 19 nt, synthetic construct
  source 1..19: mol_type = other RNA
tgaagatcatgaacaagtn

SEQ ID NO: 365 - RNA, 19 nt, synthetic construct
  source 1..19: mol_type = other RNA
ngaagatcatgaacaagtn

SEQ ID NO: 366 - RNA, 19 nt, synthetic construct
  source 1..19: mol_type = other RNA
aagtgggacatgctgaaga

SEQ ID NO: 367 - RNA, 19 nt, synthetic construct
  source 1..19: mol_type = other RNA
aagtgggacatgctgaagt

SEQ ID NO: 368 - RNA, 19 nt, synthetic construct
  source 1..19: mol_type = other RNA
aagtgggacatgctgaagn

SEQ ID NO: 369 - RNA, 19 nt, synthetic construct
  source 1..19: mol_type = other RNA
nagtgggacatgctgaagn

SEQ ID NO: 370 - RNA, 19 nt, synthetic construct
  source 1..19: mol_type = other RNA
agtgggacatgctgaagag

SEQ ID NO: 371 - RNA, 19 nt, synthetic construct
  source 1..19: mol_type = other RNA
agtgggacatgctgaagag

SEQ ID NO: 372 - RNA, 19 nt, synthetic construct
  source 1..19: mol_type = other RNA
agtgggacatgctgaagag

SEQ ID NO: 373 - RNA, 19 nt, synthetic construct
  source 1..19: mol_type = other RNA
agtgggacatgctgaagag

SEQ ID NO: 374 - RNA, 19 nt, synthetic construct
  source 1..19: mol_type = other RNA
agtgggacatgctgaagag

SEQ ID NO: 375 - RNA, 19 nt, synthetic construct
  source 1..19: mol_type = other RNA
gggcgaggtgtcgtgcttc

SEQ ID NO: 376 - RNA, 19 nt, synthetic construct
  source 1..19: mol_type = other RNA
gggcgaggtgtcgtgctta

SEQ ID NO: 377 - RNA, 19 nt, synthetic construct
  source 1..19: mol_type = other RNA
gggcgaggtgtcgtgcttt

SEQ ID NO: 378 - RNA, 19 nt, synthetic construct
  source 1..19: mol_type = other RNA
gggcgaggtgtcgtgcttn

SEQ ID NO: 379 - RNA, 19 nt, synthetic construct
  source 1..19: mol_type = other RNA
nggcgaggtgtcgtgcttn

SEQ ID NO: 380 - RNA, 19 nt, synthetic construct
  source 1..19: mol_type = other RNA
gggacgtgttggtgaatgg

SEQ ID NO: 381 - RNA, 19 nt, synthetic construct
  source 1..19: mol_type = other RNA
gggacgtgttggtgaatga

SEQ ID NO: 382 - RNA, 19 nt, synthetic construct
  source 1..19: mol_type = other RNA
gggacgtgttggtgaatgt

SEQ ID NO: 383 - RNA, 19 nt, synthetic construct
  source 1..19: mol_type = other RNA
gggacgtgttggtgaatgn

SEQ ID NO: 384 - RNA, 19 nt, synthetic construct
  source 1..19: mol_type = other RNA
nggacgtgttggtgaatgn

SEQ ID NO: 385 - RNA, 19 nt, synthetic construct
  source 1..19: mol_type = other RNA
gcacttcgccttccaggat

SEQ ID NO: 386 - RNA, 19 nt, synthetic construct
  source 1..19: mol_type = other RNA
gcacttcgccttccaggaa

SEQ ID NO: 387 - RNA, 19 nt, synthetic construct
  source 1..19: mol_type = other RNA
gcacttcgccttccaggan

SEQ ID NO: 388 - RNA, 19 nt, synthetic construct
  source 1..19: mol_type = other RNA
ncacttcgccttccaggan

SEQ ID NO: 389 - RNA, 19 nt, synthetic construct
  source 1..19: mol_type = other RNA
tccaggatgagaactacct

SEQ ID NO: 390 - RNA, 19 nt, synthetic construct
  source 1..19: mol_type = other RNA
tccaggatgagaactacca

SEQ ID NO: 391 - RNA, 19 nt, synthetic construct
  source 1..19: mol_type = other RNA
tccaggatgagaactaccn

SEQ ID NO: 392 - RNA, 19 nt, synthetic construct
  source 1..19: mol_type = other RNA
nccaggatgagaactaccn

SEQ ID NO: 393 - RNA, 19 nt, synthetic construct
  source 1..19: mol_type = other RNA
caggatgagaactacctgt

SEQ ID NO: 394 - RNA, 19 nt, synthetic construct
  source 1..19: mol_type = other RNA
caggatgagaactacctga

SEQ ID NO: 395 - RNA, 19 nt, synthetic construct
  source 1..19: mol_type = other RNA
caggatgagaactacctgn

SEQ ID NO: 396 - RNA, 19 nt, synthetic construct
  source 1..19: mol_type = other RNA
naggatgagaactacctgn

SEQ ID NO: 397 - RNA, 19 nt, synthetic construct
  source 1..19: mol_type = other RNA
gatgagaactacctgtacc

SEQ ID NO: 398 - RNA, 19 nt, synthetic construct
  source 1..19: mol_type = other RNA
gatgagaactacctgtaca

SEQ ID NO: 399 - RNA, 19 nt, synthetic construct
  source 1..19: mol_type = other RNA
gatgagaactacctgtact

SEQ ID NO: 400 - RNA, 19 nt, synthetic construct
  source 1..19: mol_type = other RNA
gatgagaactacctgtacn

SEQ ID NO: 401 - RNA, 19 nt, synthetic construct
  source 1..19: mol_type = other RNA
natgagaactacctgtacn

SEQ ID NO: 402 - RNA, 19 nt, synthetic construct
  source 1..19: mol_type = other RNA
atgagaactacctgtacct

SEQ ID NO: 403 - RNA, 19 nt, synthetic construct
  source 1..19: mol_type = other RNA
atgagaactacctgtacca

SEQ ID NO: 404 - RNA, 19 nt, synthetic construct
  source 1..19: mol_type = other RNA
atgagaactacctgtaccn

SEQ ID NO: 405 - RNA, 19 nt, synthetic construct
  source 1..19: mol_type = other RNA
ntgagaactacctgtaccn

SEQ ID NO: 406 - RNA, 19 nt, synthetic construct
  source 1..19: mol_type = other RNA
acctgtacctggtcatgga

SEQ ID NO: 407 - RNA, 19 nt, synthetic construct
  source 1..19: mol_type = other RNA
acctgtacctggtcatggt

SEQ ID NO: 408 - RNA, 19 nt, synthetic construct
  source 1..19: mol_type = other RNA
acctgtacctggtcatggn

SEQ ID NO: 409 - RNA, 19 nt, synthetic construct
  source 1..19: mol_type = other RNA
ncctgtacctggtcatggn

SEQ ID NO: 410 - RNA, 19 nt, synthetic construct
  source 1..19: mol_type = other RNA
tggtcatggagtattacgt

SEQ ID NO: 411 - RNA, 19 nt, synthetic construct
  source 1..19: mol_type = other RNA
tggtcatggagtattacga

SEQ ID NO: 412 - RNA, 19 nt, synthetic construct
  source 1..19: mol_type = other RNA
tggtcatggagtattacgn

SEQ ID NO: 413 - RNA, 19 nt, synthetic construct
  source 1..19: mol_type = other RNA
nggtcatggagtattacgn

SEQ ID NO: 414 - RNA, 19 nt, synthetic construct
  source 1..19: mol_type = other RNA
ctgacactgctgagcaagt

SEQ ID NO: 415 - RNA, 19 nt, synthetic construct
  source 1..19: mol_type = other RNA
ctgacactgctgagcaaga

SEQ ID NO: 416 - RNA, 19 nt, synthetic construct
  source 1..19: mol_type = other RNA
ctgacactgctgagcaagn

SEQ ID NO: 417 - RNA, 19 nt, synthetic construct
  source 1..19: mol_type = other RNA
ntgacactgctgagcaagn

SEQ ID NO: 418 - RNA, 19 nt, synthetic construct
  source 1..19: mol_type = other RNA
acactgctgagcaagtttg

SEQ ID NO: 419 - RNA, 19 nt, synthetic construct
  source 1..19: mol_type = other RNA
acactgctgagcaagttta

SEQ ID NO: 420 - RNA, 19 nt, synthetic construct
  source 1..19: mol_type = other RNA
acactgctgagcaagtttt

SEQ ID NO: 421 - RNA, 19 nt, synthetic construct
  source 1..19: mol_type = other RNA
acactgctgagcaagtttn

SEQ ID NO: 422 - RNA, 19 nt, synthetic construct
  source 1..19: mol_type = other RNA
acactgctgagcaagtttn

SEQ ID NO: 423 - RNA, 19 nt, synthetic construct
  source 1..19: mol_type = other RNA
actgctgagcaagtttggg

SEQ ID NO: 424 - RNA, 19 nt, synthetic construct
  source 1..19: mol_type = other RNA
actgctgagcaagtttgga

SEQ ID NO: 425 - RNA, 19 nt, synthetic construct
  source 1..19: mol_type = other RNA
actgctgagcaagtttggg

SEQ ID NO: 426 - RNA, 19 nt, synthetic construct
  source 1..19: mol_type = other RNA
actgctgagcaagtttggn

SEQ ID NO: 427 - RNA, 19 nt, synthetic construct
  source 1..19: mol_type = other RNA
actgctgagcaagtttggn

SEQ ID NO: 428 - RNA, 19 nt, synthetic construct
  source 1..19: mol_type = other RNA
acatcaaacccgacaacat

SEQ ID NO: 429 - RNA, 19 nt, synthetic construct
  source 1..19: mol_type = other RNA
acatcaaacccgacaacaa

SEQ ID NO: 430 - RNA, 19 nt, synthetic construct
  source 1..19: mol_type = other RNA
acatcaaacccgacaacan

SEQ ID NO: 431 - RNA, 19 nt, synthetic construct
  source 1..19: mol_type = other RNA
ncatcaaacccgacaacan

SEQ ID NO: 432 - RNA, 19 nt, synthetic construct
  source 1..19: mol_type = other RNA
atcaaacccgacaacatcc

SEQ ID NO: 433 - RNA, 19 nt, synthetic construct
  source 1..19: mol_type = other RNA
atcaaacccgacaacatca

SEQ ID NO: 434 - RNA, 19 nt, synthetic construct
  source 1..19: mol_type = other RNA
atcaaacccgacaacatct

SEQ ID NO: 435 - RNA, 19 nt, synthetic construct
  source 1..19: mol_type = other RNA
atcaaacccgacaacatcn

SEQ ID NO: 436 - RNA, 19 nt, synthetic construct
  source 1..19: mol_type = other RNA
ntcaaacccgacaacatcn

SEQ ID NO: 437 - RNA, 19 nt, synthetic construct
  source 1..19: mol_type = other RNA
aaacccgacaacatcctgc

SEQ ID NO: 438 - RNA, 19 nt, synthetic construct
  source 1..19: mol_type = other RNA
aaacccgacaacatcctga

SEQ ID NO: 439 - RNA, 19 nt, synthetic construct
  source 1..19: mol_type = other RNA
aaacccgacaacatcctgt

SEQ ID NO: 440 - RNA, 19 nt, synthetic construct
  source 1..19: mol_type = other RNA
aaacccgacaacatcctgn

SEQ ID NO: 441 - RNA, 19 nt, synthetic construct
  source 1..19: mol_type = other RNA
naacccgacaacatcctgn

SEQ ID NO: 442 - RNA, 19 nt, synthetic construct
  source 1..19: mol_type = other RNA
cagacgcccttctacgcgg

SEQ ID NO: 443 - RNA, 19 nt, synthetic construct
  source 1..19: mol_type = other RNA
cagacgcccttctacgcga

SEQ ID NO: 444 - RNA, 19 nt, synthetic construct
  source 1..19: mol_type = other RNA
cagacgcccttctacgcgt

SEQ ID NO: 445 - RNA, 19 nt, synthetic construct
  source 1..19: mol_type = other RNA
cagacgcccttctacgcgn

SEQ ID NO: 446 - RNA, 19 nt, synthetic construct
  source 1..19: mol_type = other RNA
nagacgcccttctacgcgn

SEQ ID NO: 447 - RNA, 19 nt, synthetic construct
  source 1..19: mol_type = other RNA
gcaagatcgtccactacaa

SEQ ID NO: 448 - RNA, 19 nt, synthetic construct
  source 1..19: mol_type = other RNA
gcaagatcgtccactacat

SEQ ID NO: 449 - RNA, 19 nt, synthetic construct
  source 1..19: mol_type = other RNA
gcaagatcgtccactacan

SEQ ID NO: 450 - RNA, 19 nt, synthetic construct
  source 1..19: mol_type = other RNA
ncaagatcgtccactacan

SEQ ID NO: 451 - RNA, 19 nt, synthetic construct
  source 1..19: mol_type = other RNA
agatcgtccactacaagga

SEQ ID NO: 452 - RNA, 19 nt, synthetic construct
  source 1..19: mol_type = other RNA
agatcgtccactacaaggt

SEQ ID NO: 453 - RNA, 19 nt, synthetic construct
  source 1..19: mol_type = other RNA
agatcgtccactacaaggn

SEQ ID NO: 454 - RNA, 19 nt, synthetic construct
  source 1..19: mol_type = other RNA
ngatcgtccactacaaggn

SEQ ID NO: 455 - RNA, 19 nt, synthetic construct
  source 1..19: mol_type = other RNA
acaaggagcacctctctct

SEQ ID NO: 456 - RNA, 19 nt, synthetic construct
  source 1..19: mol_type = other RNA
acaaggagcacctctctca

SEQ ID NO: 457 - RNA, 19 nt, synthetic construct
  source 1..19: mol_type = other RNA
acaaggagcacctctctcn

SEQ ID NO: 458 - RNA, 19 nt, synthetic construct
  source 1..19: mol_type = other RNA
ncaaggagcacctctctcn

SEQ ID NO: 459 - RNA, 19 nt, synthetic construct
  source 1..19: mol_type = other RNA
gacacatcccttcttcttt

SEQ ID NO: 460 - RNA, 19 nt, synthetic construct
  source 1..19: mol_type = other RNA
gacacatcccttcttctta

SEQ ID NO: 461 - RNA, 19 nt, synthetic construct
  source 1..19: mol_type = other RNA
gacacatcccttcttcttn

SEQ ID NO: 462 - RNA, 19 nt, synthetic construct
  source 1..19: mol_type = other RNA
nacacatcccttcttcttn

SEQ ID NO: 463 - RNA, 19 nt, synthetic construct
  source 1..19: mol_type = other RNA
cacatcccttcttctttgg

SEQ ID NO: 464 - RNA, 19 nt, synthetic construct
  source 1..19: mol_type = other RNA
cacatcccttcttctttga

SEQ ID NO: 465 - RNA, 19 nt, synthetic construct
  source 1..19: mol_type = other RNA
cacatcccttcttctttgt

SEQ ID NO: 466 - RNA, 19 nt, synthetic construct
  source 1..19: mol_type = other RNA
cacatcccttcttctttgn

SEQ ID NO: 467 - RNA, 19 nt, synthetic construct
  source 1..19: mol_type = other RNA
nacatcccttcttctttgn

SEQ ID NO: 468 - RNA, 19 nt, synthetic construct
  source 1..19: mol_type = other RNA
cctttacaccggatttcga

SEQ ID NO: 469 - RNA, 19 nt, synthetic construct
  source 1..19: mol_type = other RNA
cctttacaccggatttcgt

SEQ ID NO: 470 - RNA, 19 nt, synthetic construct
  source 1..19: mol_type = other RNA
cctttacaccggatttcgn

SEQ ID NO: 471 - RNA, 19 nt, synthetic construct
  source 1..19: mol_type = other RNA
nctttacaccggatttcgn

SEQ ID NO: 472 - RNA, 19 nt, synthetic construct
  source 1..19: mol_type = other RNA
tttacaccggatttcgaag

SEQ ID NO: 473 - RNA, 19 nt, synthetic construct
  source 1..19: mol_type = other RNA
tttacaccggatttcgaaa

SEQ ID NO: 474 - RNA, 19 nt, synthetic construct
  source 1..19: mol_type = other RNA
tttacaccggatttcgaat

SEQ ID NO: 475 - RNA, 19 nt, synthetic construct
  source 1..19: mol_type = other RNA
tttacaccggatttcgaan

SEQ ID NO: 476 - RNA, 19 nt, synthetic construct
  source 1..19: mol_type = other RNA
nttacaccggatttcgaan

SEQ ID NO: 477 - RNA, 19 nt, synthetic construct
  source 1..19: mol_type = other RNA
caccggatttcgaaggtgc

SEQ ID NO: 478 - RNA, 19 nt, synthetic construct
  source 1..19: mol_type = other RNA
caccggatttcgaaggtga

SEQ ID NO: 479 - RNA, 19 nt, synthetic construct
  source 1..19: mol_type = other RNA
caccggatttcgaaggtgt

SEQ ID NO: 480 - RNA, 19 nt, synthetic construct
  source 1..19: mol_type = other RNA
caccggatttcgaaggtgn

SEQ ID NO: 481 - RNA, 19 nt, synthetic construct
  source 1..19: mol_type = other RNA
naccggatttcgaaggtgn

SEQ ID NO: 482 - RNA, 19 nt, synthetic construct
  source 1..19: mol_type = other RNA
ccgacacatgcaacttcga

SEQ ID NO: 483 - RNA, 19 nt, synthetic construct
  source 1..19: mol_type = other RNA
ccgacacatgcaacttcgt

SEQ ID NO: 484 - RNA, 19 nt, synthetic construct
  source 1..19: mol_type = other RNA
ccgacacatgcaacttcgn

SEQ ID NO: 485 - RNA, 19 nt, synthetic construct
  source 1..19: mol_type = other RNA
ncgacacatgcaacttcgn

SEQ ID NO: 486 - RNA, 19 nt, synthetic construct
  source 1..19: mol_type = other RNA
gacacatgcaacttcgact

SEQ ID NO: 487 - RNA, 19 nt, synthetic construct
  source 1..19: mol_type = other RNA
gacacatgcaacttcgaca

SEQ ID NO: 488 - RNA, 19 nt, synthetic construct
  source 1..19: mol_type = other RNA
gacacatgcaacttcgacn

SEQ ID NO: 489 - RNA, 19 nt, synthetic construct
  source 1..19: mol_type = other RNA
nacacatgcaacttcgacn

SEQ ID NO: 490 - RNA, 19 nt, synthetic construct
  source 1..19: mol_type = other RNA
acacatgcaacttcgactt

SEQ ID NO: 491 - RNA, 19 nt, synthetic construct
  source 1..19: mol_type = other RNA
acacatgcaacttcgacta

SEQ ID NO: 492 - RNA, 19 nt, synthetic construct
  source 1..19: mol_type = other RNA
acacatgcaacttcgactn

SEQ ID NO: 493 - RNA, 19 nt, synthetic construct
  source 1..19: mol_type = other RNA
ncacatgcaacttcgactn

SEQ ID NO: 494 - RNA, 19 nt, synthetic construct
  source 1..19: mol_type = other RNA
atgcaacttcgacttggtg

SEQ ID NO: 495 - RNA, 19 nt, synthetic construct
  source 1..19: mol_type = other RNA
atgcaacttcgacttggta

SEQ ID NO: 496 - RNA, 19 nt, synthetic construct
  source 1..19: mol_type = other RNA
atgcaacttcgacttggtt

SEQ ID NO: 497 - RNA, 19 nt, synthetic construct
  source 1..19: mol_type = other RNA
atgcaacttcgacttggtn

SEQ ID NO: 498 - RNA, 19 nt, synthetic construct
  source 1..19: mol_type = other RNA
ntgcaacttcgacttggtn

SEQ ID NO: 499 - RNA, 19 nt, synthetic construct
  source 1..19: mol_type = other RNA
atgaaacagctgaagtggc

SEQ ID NO: 500 - RNA, 19 nt, synthetic construct
  source 1..19: mol_type = other RNA
atgaaacagctgaagtgga

SEQ ID NO: 501 - RNA, 19 nt, synthetic construct
  source 1..19: mol_type = other RNA
atgaaacagctgaagtggt

SEQ ID NO: 502 - RNA, 19 nt, synthetic construct
  source 1..19: mol_type = other RNA
atgaaacagctgaagtggn

SEQ ID NO: 503 - RNA, 19 nt, synthetic construct
  source 1..19: mol_type = other RNA
ntgaaacagctgaagtggn

SEQ ID NO: 504 - RNA, 19 nt, synthetic construct
  source 1..19: mol_type = other RNA
cctgaaccctagaactgtc

SEQ ID NO: 505 - RNA, 19 nt, synthetic construct
  source 1..19: mol_type = other RNA
cctgaaccctagaactgta

SEQ ID NO: 506 - RNA, 19 nt, synthetic construct
  source 1..19: mol_type = other RNA
cctgaaccctagaactgtt

SEQ ID NO: 507 - RNA, 19 nt, synthetic construct
  source 1..19: mol_type = other RNA
cctgaaccctagaactgtn

SEQ ID NO: 508 - RNA, 19 nt, synthetic construct
  source 1..19: mol_type = other RNA
nctgaaccctagaactgtn

SEQ ID NO: 509 - RNA, 19 nt, synthetic construct
  source 1..19: mol_type = other RNA
aaccctagaactgtcttcg

SEQ ID NO: 510 - RNA, 19 nt, synthetic construct
  source 1..19: mol_type = other RNA
aaccctagaactgtcttca

SEQ ID NO: 511 - RNA, 19 nt, synthetic construct
  source 1..19: mol_type = other RNA
aaccctagaactgtcttct

SEQ ID NO: 512 - RNA, 19 nt, synthetic construct
  source 1..19: mol_type = other RNA
aaccctagaactgtcttcn

SEQ ID NO: 513 - RNA, 19 nt, synthetic construct
  source 1..19: mol_type = other RNA
naccctagaactgtcttcn

SEQ ID NO: 514 - RNA, 19 nt, synthetic construct
  source 1..19: mol_type = other RNA
accctagaactgtcttcga

SEQ ID NO: 515 - RNA, 19 nt, synthetic construct
  source 1..19: mol_type = other RNA
accctagaactgtcttcgt

SEQ ID NO: 516 - RNA, 19 nt, synthetic construct
  source 1..19: mol_type = other RNA
accctagaactgtcttcgn

SEQ ID NO: 517 - RNA, 19 nt, synthetic construct
  source 1..19: mol_type = other RNA
nccctagaactgtcttcgn

SEQ ID NO: 518 - RNA, 19 nt, synthetic construct
  source 1..19: mol_type = other RNA
ccctagaactgtcttcgac

SEQ ID NO: 519 - RNA, 19 nt, synthetic construct
  source 1..19: mol_type = other RNA
ccctagaactgtcttcgaa

SEQ ID NO: 520 - RNA, 19 nt, synthetic construct
  source 1..19: mol_type = other RNA
ccctagaactgtcttcgat

SEQ ID NO: 521 - RNA, 19 nt, synthetic construct
  source 1..19: mol_type = other RNA
ccctagaactgtcttcgan

SEQ ID NO: 522 - RNA, 19 nt, synthetic construct
  source 1..19: mol_type = other RNA
ncctagaactgtcttcgan

SEQ ID NO: 523 - RNA, 19 nt, synthetic construct
  source 1..19: mol_type = other RNA
cctagaactgtcttcgact

SEQ ID NO: 524 - RNA, 19 nt, synthetic construct
  source 1..19: mol_type = other RNA
cctagaactgtcttcgaca

SEQ ID NO: 525 - RNA, 19 nt, synthetic construct
  source 1..19: mol_type = other RNA
cctagaactgtcttcgacn

SEQ ID NO: 526 - RNA, 19 nt, synthetic construct
  source 1..19: mol_type = other RNA
nctagaactgtcttcgacn

SEQ ID NO: 527 - RNA, 19 nt, synthetic construct
  source 1..19: mol_type = other RNA
ctagaactgtcttcgactc

SEQ ID NO: 528 - RNA, 19 nt, synthetic construct
  source 1..19: mol_type = other RNA
ctagaactgtcttcgacta

SEQ ID NO: 529 - RNA, 19 nt, synthetic construct
  source 1..19: mol_type = other RNA
ctagaactgtcttcgactt

SEQ ID NO: 530 - RNA, 19 nt, synthetic construct
  source 1..19: mol_type = other RNA
ctagaactgtcttcgactn

SEQ ID NO: 531 - RNA, 19 nt, synthetic construct
  source 1..19: mol_type = other RNA
ntagaactgtcttcgactn

SEQ ID NO: 532 - RNA, 19 nt, synthetic construct
  source 1..19: mol_type = other RNA
gcttactcgggaaatttgc

SEQ ID NO: 533 - RNA, 19 nt, synthetic construct
  source 1..19: mol_type = other RNA
gcttactcgggaaatttga

SEQ ID NO: 534 - RNA, 19 nt, synthetic construct
  source 1..19: mol_type = other RNA
gcttactcgggaaatttgt

SEQ ID NO: 535 - RNA, 19 nt, synthetic construct
  source 1..19: mol_type = other RNA
gcttactcgggaaatttgn

SEQ ID NO: 536 - RNA, 19 nt, synthetic construct
  source 1..19: mol_type = other RNA
ncttactcgggaaatttgn

SEQ ID NO: 537 - RNA, 19 nt, synthetic construct
  source 1..19: mol_type = other RNA
cttactcgggaaatttgct

SEQ ID NO: 538 - RNA, 19 nt, synthetic construct
  source 1..19: mol_type = other RNA
cttactcgggaaatttgca

SEQ ID NO: 539 - RNA, 19 nt, synthetic construct
  source 1..19: mol_type = other RNA
cttactcgggaaatttgcn

SEQ ID NO: 540 - RNA, 19 nt, synthetic construct
  source 1..19: mol_type = other RNA
nttactcgggaaatttgcn

SEQ ID NO: 541 - RNA, 19 nt, synthetic construct
  source 1..19: mol_type = other RNA
tcgggaaatttgcttttgc

SEQ ID NO: 542 - RNA, 19 nt, synthetic construct
  source 1..19: mol_type = other RNA
tcgggaaatttgcttttga

SEQ ID NO: 543 - RNA, 19 nt, synthetic construct
  source 1..19: mol_type = other RNA
tcgggaaatttgcttttgt

SEQ ID NO: 544 - RNA, 19 nt, synthetic construct
  source 1..19: mol_type = other RNA
tcgggaaatttgcttttgn

SEQ ID NO: 545 - RNA, 19 nt, synthetic construct
  source 1..19: mol_type = other RNA
ncgggaaatttgcttttgn

SEQ ID NO: 546 - RNA, 19 nt, synthetic construct
  source 1..19: mol_type = other RNA
ggaaatttgcttttgccaa

SEQ ID NO: 547 - RNA, 19 nt, synthetic construct
  source 1..19: mol_type = other RNA
ggaaatttgcttttgccat

SEQ ID NO: 548 - RNA, 19 nt, synthetic construct
  source 1..19: mol_type = other RNA
ggaaatttgcttttgccan

SEQ ID NO: 549 - RNA, 19 nt, synthetic construct
  source 1..19: mol_type = other RNA
ngaaatttgcttttgccan

SEQ ID NO: 550 - RNA, 19 nt, synthetic construct
  source 1..19: mol_type = other RNA
aaatttgcttttgccaaac

SEQ ID NO: 551 - RNA, 19 nt, synthetic construct
  source 1..19: mol_type = other RNA
aaatttgcttttgccaaaa

SEQ ID NO: 552 - RNA, 19 nt, synthetic construct
  source 1..19: mol_type = other RNA
aaatttgcttttgccaaat

SEQ ID NO: 553 - RNA, 19 nt, synthetic construct
  source 1..19: mol_type = other RNA
aaatttgcttttgccaaan

SEQ ID NO: 554 - RNA, 19 nt, synthetic construct
  source 1..19: mol_type = other RNA
naatttgcttttgccaaan

SEQ ID NO: 555 - RNA, 19 nt, synthetic construct
  source 1..19: mol_type = other RNA
ggcggtttggatatttatt

SEQ ID NO: 556 - RNA, 19 nt, synthetic construct
  source 1..19: mol_type = other RNA
ggcggtttggatatttata

SEQ ID NO: 557 - RNA, 19 nt, synthetic construct
  source 1..19: mol_type = other RNA
ggcggtttggatatttatn

SEQ ID NO: 558 - RNA, 19 nt, synthetic construct
  source 1..19: mol_type = other RNA
ngcggtttggatatttatn

SEQ ID NO: 559 - RNA, 19 nt, synthetic construct
  source 1..19: mol_type = other RNA
gcggtttggatatttattg

SEQ ID NO: 560 - RNA, 19 nt, synthetic construct
  source 1..19: mol_type = other RNA
gcggtttggatatttatta

SEQ ID NO: 561 - RNA, 19 nt, synthetic construct
  source 1..19: mol_type = other RNA
gcggtttggatatttattt

SEQ ID NO: 562 - RNA, 19 nt, synthetic construct
  source 1..19: mol_type = other RNA
gcggtttggatatttattn

SEQ ID NO: 563 - RNA, 19 nt, synthetic construct
  source 1..19: mol_type = other RNA
ncggtttggatatttattn

SEQ ID NO: 564 - RNA, 19 nt, synthetic construct
  source 1..19: mol_type = other RNA
ggtttggatatttattgac

SEQ ID NO: 565 - RNA, 19 nt, synthetic construct
  source 1..19: mol_type = other RNA
ggtttggatatttattgaa

SEQ ID NO: 566 - RNA, 19 nt, synthetic construct
  source 1..19: mol_type = other RNA
ggtttggatatttattgat

SEQ ID NO: 567 - RNA, 19 nt, synthetic construct
  source 1..19: mol_type = other RNA
ggtttggatatttattgan

SEQ ID NO: 568 - RNA, 19 nt, synthetic construct
  source 1..19: mol_type = other RNA
ngtttggatatttattgan

SEQ ID NO: 569 - RNA, 19 nt, synthetic construct
  source 1..19: mol_type = other RNA
ccccaatccacgttttgga

SEQ ID NO: 570 - RNA, 19 nt, synthetic construct
  source 1..19: mol_type = other RNA
ccccaatccacgttttggt

SEQ ID NO: 571 - RNA, 19 nt, synthetic construct
  source 1..19: mol_type = other RNA
ccccaatccacgttttggn

SEQ ID NO: 572 - RNA, 19 nt, synthetic construct
  source 1..19: mol_type = other RNA
ncccaatccacgttttggn

SEQ ID NO: 573 - RNA, 19 nt, synthetic construct
  source 1..19: mol_type = other RNA
cccaatccacgttttggat

SEQ ID NO: 574 - RNA, 19 nt, synthetic construct
  source 1..19: mol_type = other RNA
cccaatccacgttttggaa

SEQ ID NO: 575 - RNA, 19 nt, synthetic construct
  source 1..19: mol_type = other RNA
cccaatccacgttttggan

SEQ ID NO: 576 - RNA, 19 nt, synthetic construct
  source 1..19: mol_type = other RNA
nccaatccacgttttggan

SEQ ID NO: 577 - RNA, 19 nt, synthetic construct
  source 1..19: mol_type = other RNA
caatccacgttttggatgc

SEQ ID NO: 578 - RNA, 19 nt, synthetic construct
  source 1..19: mol_type = other RNA
caatccacgttttggatga

SEQ ID NO: 579 - RNA, 19 nt, synthetic construct
  source 1..19: mol_type = other RNA
caatccacgttttggatgt

SEQ ID NO: 580 - RNA, 19 nt, synthetic construct
  source 1..19: mol_type = other RNA
caatccacgttttggatgn

SEQ ID NO: 581 - RNA, 19 nt, synthetic construct
  source 1..19: mol_type = other RNA
naatccacgttttggatgn

SEQ ID NO: 582 - RNA, 19 nt, synthetic construct
  source 1..19: mol_type = other RNA
tccacgttttggatgcact

SEQ ID NO: 583 - RNA, 19 nt, synthetic construct
  source 1..19: mol_type = other RNA
tccacgttttggatgcaca

SEQ ID NO: 584 - RNA, 19 nt, synthetic construct
  source 1..19: mol_type = other RNA
tccacgttttggatgcacn

SEQ ID NO: 585 - RNA, 19 nt, synthetic construct
  source 1..19: mol_type = other RNA
nccacgttttggatgcacn

SEQ ID NO: 586 - RNA, 19 nt, synthetic construct
  source 1..19: mol_type = other RNA
gttttggatgcactgagac

SEQ ID NO: 587 - RNA, 19 nt, synthetic construct
  source 1..19: mol_type = other RNA
gttttggatgcactgagaa

SEQ ID NO: 588 - RNA, 19 nt, synthetic construct
  source 1..19: mol_type = other RNA
gttttggatgcactgagat

SEQ ID NO: 589 - RNA, 19 nt, synthetic construct
  source 1..19: mol_type = other RNA
gttttggatgcactgagan

SEQ ID NO: 590 - RNA, 19 nt, synthetic construct
  source 1..19: mol_type = other RNA
nttttggatgcactgagan

SEQ ID NO: 591 - RNA, 19 nt, synthetic construct
  source 1..19: mol_type = other RNA
ttttggatgcactgagacc

SEQ ID NO: 592 - RNA, 19 nt, synthetic construct
  source 1..19: mol_type = other RNA
ttttggatgcactgagaca

SEQ ID NO: 593 - RNA, 19 nt, synthetic construct
  source 1..19: mol_type = other RNA
ttttggatgcactgagact

SEQ ID NO: 594 - RNA, 19 nt, synthetic construct
  source 1..19: mol_type = other RNA
ttttggatgcactgagacn

SEQ ID NO: 595 - RNA, 19 nt, synthetic construct
  source 1..19: mol_type = other RNA
ntttggatgcactgagacn

SEQ ID NO: 596 - RNA, 19 nt, synthetic construct
  source 1..19: mol_type = other RNA
ccgacattcctcggtatta

SEQ ID NO: 597 - RNA, 19 nt, synthetic construct
  source 1..19: mol_type = other RNA
ccgacattcctcggtattt

SEQ ID NO: 598 - RNA, 19 nt, synthetic construct
  source 1..19: mol_type = other RNA
ccgacattcctcggtattn

SEQ ID NO: 599 - RNA, 19 nt, synthetic construct
  source 1..19: mol_type = other RNA
ncgacattcctcggtattn

SEQ ID NO: 600 - RNA, 19 nt, synthetic construct
  source 1..19: mol_type = other RNA
attcctcggtatttattgt

SEQ ID NO: 601 - RNA, 19 nt, synthetic construct
  source 1..19: mol_type = other RNA
attcctcggtatttattga

SEQ ID NO: 602 - RNA, 19 nt, synthetic construct
  source 1..19: mol_type = other RNA
attcctcggtatttattgn

SEQ ID NO: 603 - RNA, 19 nt, synthetic construct
  source 1..19: mol_type = other RNA
nttcctcggtatttattgn

SEQ ID NO: 604 - RNA, 19 nt, synthetic construct
  source 1..19: mol_type = other RNA
tcctcggtatttattgtct

SEQ ID NO: 605 - RNA, 19 nt, synthetic construct
  source 1..19: mol_type = other RNA
tcctcggtatttattgtca

SEQ ID NO: 606 - RNA, 19 nt, synthetic construct
  source 1..19: mol_type = other RNA
tcctcggtatttattgtcn

SEQ ID NO: 607 - RNA, 19 nt, synthetic construct
  source 1..19: mol_type = other RNA
ncctcggtatttattgtcn

SEQ ID NO: 608 - RNA, 19 nt, synthetic construct
  source 1..19: mol_type = other RNA
cctcggtatttattgtctg

SEQ ID NO: 609 - RNA, 19 nt, synthetic construct
  source 1..19: mol_type = other RNA
cctcggtatttattgtcta

SEQ ID NO: 610 - RNA, 19 nt, synthetic construct
  source 1..19: mol_type = other RNA
cctcggtatttattgtctt

SEQ ID NO: 611 - RNA, 19 nt, synthetic construct
  source 1..19: mol_type = other RNA
cctcggtatttattgtctn

SEQ ID NO: 612 - RNA, 19 nt, synthetic construct
  source 1..19: mol_type = other RNA
nctcggtatttattgtctn

SEQ ID NO: 613 - RNA, 19 nt, synthetic construct
  source 1..19: mol_type = other RNA
tcggtatttattgtctgtc

SEQ ID NO: 614 - RNA, 19 nt, synthetic construct
  source 1..19: mol_type = other RNA
tcggtatttattgtctgta

SEQ ID NO: 615 - RNA, 19 nt, synthetic construct
  source 1..19: mol_type = other RNA
tcggtatttattgtctgtt

SEQ ID NO: 616 - RNA, 19 nt, synthetic construct
  source 1..19: mol_type = other RNA
tcggtatttattgtctgtn

SEQ ID NO: 617 - RNA, 19 nt, synthetic construct
  source 1..19: mol_type = other RNA
ncggtatttattgtctgtn

SEQ ID NO: 618 - RNA, 19 nt, synthetic construct
  source 1..19: mol_type = other RNA
cggtatttattgtctgtcc

SEQ ID NO: 619 - RNA, 19 nt, synthetic construct
  source 1..19: mol_type = other RNA
cggtatttattgtctgtca

SEQ ID NO: 620 - RNA, 19 nt, synthetic construct
  source 1..19: mol_type = other RNA
cggtatttattgtctgtct

SEQ ID NO: 621 - RNA, 19 nt, synthetic construct
  source 1..19: mol_type = other RNA
cggtatttattgtctgtcn

SEQ ID NO: 622 - RNA, 19 nt, synthetic construct
  source 1..19: mol_type = other RNA
nggtatttattgtctgtcn

SEQ ID NO: 623 - RNA, 19 nt, synthetic construct
  source 1..19: mol_type = other RNA
ttgtctgtccccacctagg

SEQ ID NO: 624 - RNA, 19 nt, synthetic construct
  source 1..19: mol_type = other RNA
ttgtctgtccccacctaga

SEQ ID NO: 625 - RNA, 19 nt, synthetic construct
  source 1..19: mol_type = other RNA
ttgtctgtccccacctagt

SEQ ID NO: 626 - RNA, 19 nt, synthetic construct
  source 1..19: mol_type = other RNA
ttgtctgtccccacctagn

SEQ ID NO: 627 - RNA, 19 nt, synthetic construct
  source 1..19: mol_type = other RNA
ntgtctgtccccacctagn

SEQ ID NO: 628 - RNA, 19 nt, synthetic construct
  source 1..19: mol_type = other RNA
ccctcgcgaataaaaggcc

SEQ ID NO: 629 - RNA, 19 nt, synthetic construct
  source 1..19: mol_type = other RNA
ccctcgcgaataaaaggca

SEQ ID NO: 630 - RNA, 19 nt, synthetic construct
  source 1..19: mol_type = other RNA
ccctcgcgaataaaaggct

SEQ ID NO: 631 - RNA, 19 nt, synthetic construct
  source 1..19: mol_type = other RNA
ccctcgcgaataaaaggcn

SEQ ID NO: 632 - RNA, 19 nt, synthetic construct
  source 1..19: mol_type = other RNA
ncctcgcgaataaaaggcn

SEQ ID NO: 633 - RNA, 21 nt, synthetic construct
  modified_base 1: mod_base = um
  modified_base 1^2: mod_base = OTHER; note = phosphorothioate linkage
  modified_base 2: mod_base = OTHER; note = 2'-fluorocytidine
  modified_base 2^3: mod_base = OTHER; note = phosphorothioate linkage
  modified_base 3: mod_base = cm
  modified_base 3^4: mod_base = OTHER; note = phosphorothioate linkage
  modified_base 4: mod_base = OTHER; note = 2'-fluoroadenosine
  modified_base 5: mod_base = cm
  modified_base 6: mod_base = OTHER; note = 2'-fluorouridine
  modified_base 7: mod_base = um
  modified_base 8: mod_base = OTHER; note = 2'-fluorocytidine
  modified_base 9: mod_base = OTHER; note = 2'-O-methyladenosine
  modified_base 10: mod_base = OTHER; note = 2'-fluoroguanosine
  modified_base 11: mod_base = cm
  modified_base 12: mod_base = OTHER; note = 2'-fluorouridine
  modified_base 13: mod_base = gm
  modified_base 14: mod_base = OTHER; note = 2'-fluorouridine
  modified_base 15: mod_base = um
  modified_base 16: mod_base = OTHER; note = 2'-fluorouridine
  modified_base 17: mod_base = cm
  modified_base 18: mod_base = OTHER; note = 2'-fluoroadenosine
  modified_base 19: mod_base = um
  modified_base 20: mod_base = OTHER; note = 2'-fluorocytidine
  modified_base 20^21: mod_base = OTHER; note = phosphorothioate linkage
  modified_base 21: mod_base = cm
  source 1..21: mol_type = other RNA
tccacttcagctgtttcatcc

SEQ ID NO: 634 - RNA, 21 nt, synthetic construct
  modified_base 1: mod_base = um
  modified_base 1^2: mod_base = OTHER; note = phosphorothioate linkage
  modified_base 2: mod_base = OTHER; note = 2'-fluoroadenosine
  modified_base 2^3: mod_base = OTHER; note = phosphorothioate linkage
  modified_base 3: mod_base = cm
  modified_base 3^4: mod_base = OTHER; note = phosphorothioate linkage
  modified_base 4: mod_base = OTHER; note = 2'-fluoroadenosine
  modified_base 5: mod_base = gm
  modified_base 6: mod_base = OTHER; note = 2'-fluorouridine
  modified_base 7: mod_base = um
  modified_base 8: mod_base = OTHER; note = 2'-fluorocytidine
  modified_base 9: mod_base = um
  modified_base 10: mod_base = OTHER; note = 2'-fluoroadenosine
  modified_base 11: mod_base = gm
  modified_base 12: mod_base = OTHER; note = 2'-fluoroguanosine
  modified_base 13: mod_base = gm
  modified_base 14: mod_base = OTHER; note = 2'-fluorouridine
  modified_base 15: mod_base = um
  modified_base 16: mod_base = OTHER; note = 2'-fluorocytidine
  modified_base 17: mod_base = OTHER; note = 2'-O-methyladenosine
  modified_base 18: mod_base = OTHER; note = 2'-fluoroguanosine
  modified_base 19: mod_base = gm
  modified_base 20: mod_base = OTHER; note = 2'-fluoroguanosine
  modified_base 20^21: mod_base = OTHER; note = phosphorothioate linkage
  modified_base 21: mod_base = OTHER; note = 2'-O-methyladenosine
  source 1..21: mol_type = other RNA
tacagttctagggttcaggga

SEQ ID NO: 635 - RNA, 21 nt, synthetic construct
  modified_base 1: mod_base = um
  modified_base 1^2: mod_base = OTHER; note = phosphorothioate linkage
  modified_base 2: mod_base = OTHER; note = 2'-fluorocytidine
  modified_base 2^3: mod_base = OTHER; note = phosphorothioate linkage
  modified_base 3: mod_base = gm
  modified_base 3^4: mod_base = OTHER; note = phosphorothioate linkage
  modified_base 4: mod_base = OTHER; note = 2'-fluoroadenosine
  modified_base 5: mod_base = OTHER; note = 2'-O-methyladenosine
  modified_base 6: mod_base = OTHER; note = 2'-fluoroguanosine
  modified_base 7: mod_base = OTHER; note = 2'-O-methyladenosine
  modified_base 8: mod_base = OTHER; note = 2'-fluorocytidine
  modified_base 9: mod_base = OTHER; note = 2'-O-methyladenosine
  modified_base 10: mod_base = OTHER; note = 2'-fluoroguanosine
  modified_base 11: mod_base = um
  modified_base 12: mod_base = OTHER; note = 2'-fluorouridine
  modified_base 13: mod_base = cm
  modified_base 14: mod_base = OTHER; note = 2'-fluorouridine
  modified_base 15: mod_base = OTHER; note = 2'-O-methyladenosine
  modified_base 16: mod_base = OTHER; note = 2'-fluoroguanosine
  modified_base 17: mod_base = gm
  modified_base 18: mod_base = OTHER; note = 2'-fluoroguanosine
  modified_base 19: mod_base = um
  modified_base 20: mod_base = OTHER; note = 2'-fluorouridine
  modified_base 20^21: mod_base = OTHER; note = phosphorothioate linkage
  modified_base 21: mod_base = cm
  source 1..21: mol_type = other RNA
tcgaagacagttctagggttc

SEQ ID NO: 636 - RNA, 21 nt, synthetic construct
  modified_base 1: mod_base = um
  modified_base 1^2: mod_base = OTHER; note = phosphorothioate linkage
  modified_base 2: mod_base = OTHER; note = 2'-fluorouridine
  modified_base 2^3: mod_base = OTHER; note = phosphorothioate linkage
  modified_base 3: mod_base = cm
  modified_base 3^4: mod_base = OTHER; note = phosphorothioate linkage
  modified_base 4: mod_base = OTHER; note = 2'-fluoroguanosine
  modified_base 5: mod_base = OTHER; note = 2'-O-methyladenosine
  modified_base 6: mod_base = OTHER; note = 2'-fluoroadenosine
  modified_base 7: mod_base = gm
  modified_base 8: mod_base = OTHER; note = 2'-fluoroadenosine
  modified_base 9: mod_base = cm
  modified_base 10: mod_base = OTHER; note = 2'-fluoroadenosine
  modified_base 11: mod_base = gm
  modified_base 12: mod_base = OTHER; note = 2'-fluorouridine
  modified_base 13: mod_base = um
  modified_base 14: mod_base = OTHER; note = 2'-fluorocytidine
  modified_base 15: mod_base = um
  modified_base 16: mod_base = OTHER; note = 2'-fluoroadenosine
  modified_base 17: mod_base = gm
  modified_base 18: mod_base = OTHER; note = 2'-fluoroguanosine
  modified_base 19: mod_base = gm
  modified_base 20: mod_base = OTHER; note = 2'-fluorouridine
  modified_base 20^21: mod_base = OTHER; note = phosphorothioate linkage
  modified_base 21: mod_base = cm
  source 1..21: mol_type = other RNA
ttcgaagacagttctagggtc

SEQ ID NO: 637 - RNA, 21 nt, synthetic construct
  modified_base 1: mod_base = OTHER; note = 2'-O-methyladenosine
  modified_base 1^2: mod_base = OTHER; note = phosphorothioate linkage
  modified_base 2: mod_base = OTHER; note = 2'-fluoroguanosine
  modified_base 2^3: mod_base = OTHER; note = phosphorothioate linkage
  modified_base 3: mod_base = um
  modified_base 3^4: mod_base = OTHER; note = phosphorothioate linkage
  modified_base 4: mod_base = OTHER; note = 2'-fluorocytidine
  modified_base 5: mod_base = gm
  modified_base 6: mod_base = OTHER; note = 2'-fluoroadenosine
  modified_base 7: mod_base = OTHER; note = 2'-O-methyladenosine
  modified_base 8: mod_base = OTHER; note = 2'-fluoroguanosine
  modified_base 9: mod_base = OTHER; note = 2'-O-methyladenosine
  modified_base 10: mod_base = OTHER; note = 2'-fluorocytidine
  modified_base 11: mod_base = OTHER; note = 2'-O-methyladenosine
  modified_base 12: mod_base = OTHER; note = 2'-fluoroguanosine
  modified_base 13: mod_base = um
  modified_base 14: mod_base = OTHER; note = 2'-fluorouridine
  modified_base 15: mod_base = cm
  modified_base 16: mod_base = OTHER; note = 2'-fluorouridine
  modified_base 17: mod_base = OTHER; note = 2'-O-methyladenosine
  modified_base 18: mod_base = OTHER; note = 2'-fluoroguanosine
  modified_base 19: mod_base = gm
  modified_base 20: mod_base = OTHER; note = 2'-fluoroguanosine
  modified_base 20^21: mod_base = OTHER; note = phosphorothioate linkage
  modified_base 21: mod_base = um
  source 1..21: mol_type = other RNA
agtcgaagacagttctagggt

SEQ ID NO: 638 - RNA, 21 nt, synthetic construct
  modified_base 1: mod_base = um
  modified_base 1^2: mod_base = OTHER; note = phosphorothioate linkage
  modified_base 2: mod_base = OTHER; note = 2'-fluoroadenosine
  modified_base 2^3: mod_base = OTHER; note = phosphorothioate linkage
  modified_base 3: mod_base = gm
  modified_base 3^4: mod_base = OTHER; note = phosphorothioate linkage
  modified_base 4: mod_base = OTHER; note = 2'-fluorouridine
  modified_base 5: mod_base = cm
  modified_base 6: mod_base = OTHER; note = 2'-fluoroguanosine
  modified_base 7: mod_base = OTHER; note = 2'-O-methyladenosine
  modified_base 8: mod_base = OTHER; note = 2'-fluoroadenosine
  modified_base 9: mod_base = gm
  modified_base 10: mod_base = OTHER; note = 2'-fluoroadenosine
  modified_base 11: mod_base = cm
  modified_base 12: mod_base = OTHER; note = 2'-fluoroadenosine
  modified_base 13: mod_base = gm
  modified_base 14: mod_base = OTHER; note = 2'-fluorouridine
  modified_base 15: mod_base = um
  modified_base 16: mod_base = OTHER; note = 2'-fluorocytidine
  modified_base 17: mod_base = um
  modified_base 18: mod_base = OTHER; note = 2'-fluoroadenosine
  modified_base 19: mod_base = gm
  modified_base 20: mod_base = OTHER; note = 2'-fluoroguanosine
  modified_base 20^21: mod_base = OTHER; note = phosphorothioate linkage
  modified_base 21: mod_base = gm
  source 1..21: mol_type = other RNA
tagtcgaagacagttctaggg

SEQ ID NO: 639 - RNA, 21 nt, synthetic construct
  modified_base 1: mod_base = OTHER; note = 2'-O-methyladenosine
  modified_base 1^2: mod_base = OTHER; note = phosphorothioate linkage
  modified_base 2: mod_base = OTHER; note = 2'-fluoroguanosine
  modified_base 2^3: mod_base = OTHER; note = phosphorothioate linkage
  modified_base 3: mod_base = cm
  modified_base 3^4: mod_base = OTHER; note = phosphorothioate linkage
  modified_base 4: mod_base = OTHER; note = 2'-fluoroadenosine
  modified_base 5: mod_base = OTHER; note = 2'-O-methyladenosine
  modified_base 6: mod_base = OTHER; note = 2'-fluoroadenosine
  modified_base 7: mod_base = um
  modified_base 8: mod_base = OTHER; note = 2'-fluorouridine
  modified_base 9: mod_base = um
  modified_base 10: mod_base = OTHER; note = 2'-fluorocytidine
  modified_base 11: mod_base = cm
  modified_base 12: mod_base = OTHER; note = 2'-fluorocytidine
  modified_base 13: mod_base = gm
  modified_base 14: mod_base = OTHER; note = 2'-fluoroadenosine
  modified_base 15: mod_base = gm
  modified_base 16: mod_base = OTHER; note = 2'-fluorouridine
  modified_base 17: mod_base = OTHER; note = 2'-O-methyladenosine
  modified_base 18: mod_base = OTHER; note = 2'-fluoroadenosine
  modified_base 19: mod_base = gm
  modified_base 20: mod_base = OTHER; note = 2'-fluorocytidine
  modified_base 20^21: mod_base = OTHER; note = phosphorothioate linkage
  modified_base 21: mod_base = OTHER; note = 2'-O-methyladenosine
  source 1..21: mol_type = other RNA
agcaaatttcccgagtaagca

SEQ ID NO: 640 - RNA, 21 nt, synthetic construct
  modified_base 1: mod_base = um
  modified_base 1^2: mod_base = OTHER; note = phosphorothioate linkage
  modified_base 2: mod_base = OTHER; note = 2'-fluorouridine
  modified_base 2^3: mod_base = OTHER; note = phosphorothioate linkage
  modified_base 3: mod_base = gm
  modified_base 3^4: mod_base = OTHER; note = phosphorothioate linkage
  modified_base 4: mod_base = OTHER; note = 2'-fluoroguanosine
  modified_base 5: mod_base = cm
  modified_base 6: mod_base = OTHER; note = 2'-fluoroadenosine
  modified_base 7: mod_base = OTHER; note = 2'-O-methyladenosine
  modified_base 8: mod_base = OTHER; note = 2'-fluoroadenosine
  modified_base 9: mod_base = OTHER; note = 2'-O-methyladenosine
  modified_base 10: mod_base = OTHER; note = 2'-fluoroguanosine
  modified_base 11: mod_base = cm
  modified_base 12: mod_base = OTHER; note = 2'-fluoroadenosine
  modified_base 13: mod_base = OTHER; note = 2'-O-methyladenosine
  modified_base 14: mod_base = OTHER; note = 2'-fluoroadenosine
  modified_base 15: mod_base = um
  modified_base 16: mod_base = OTHER; note = 2'-fluorouridine
  modified_base 17: mod_base = um
  modified_base 18: mod_base = OTHER; note = 2'-fluorocytidine
  modified_base 19: mod_base = cm
  modified_base 20: mod_base = OTHER; note = 2'-fluorocytidine
  modified_base 20^21: mod_base = OTHER; note = phosphorothioate linkage
  modified_base 21: mod_base = gm
  source 1..21: mol_type = other RNA
ttggcaaaagcaaatttcccg

SEQ ID NO: 641 - RNA, 21 nt, synthetic construct
  modified_base 1: mod_base = OTHER; note = 2'-O-methyladenosine
  modified_base 1^2: mod_base = OTHER; note = phosphorothioate linkage
  modified_base 2: mod_base = OTHER; note = 2'-fluorouridine
  modified_base 2^3: mod_base = OTHER; note = phosphorothioate linkage
  modified_base 3: mod_base = cm
  modified_base 3^4: mod_base = OTHER; note = phosphorothioate linkage
  modified_base 4: mod_base = OTHER; note = 2'-fluorocytidine
  modified_base 5: mod_base = OTHER; note = 2'-O-methyladenosine
  modified_base 6: mod_base = OTHER; note = 2'-fluoroadenosine
  modified_base 7: mod_base = OTHER; note = 2'-O-methyladenosine
  modified_base 8: mod_base = OTHER; note = 2'-fluoroadenosine
  modified_base 9: mod_base = cm
  modified_base 10: mod_base = OTHER; note = 2'-fluoroguanosine
  modified_base 11: mod_base = um
  modified_base 12: mod_base = OTHER; note = 2'-fluoroguanosine
  modified_base 13: mod_base = gm
  modified_base 14: mod_base = OTHER; note = 2'-fluoroadenosine
  modified_base 15: mod_base = um
  modified_base 16: mod_base = OTHER; note = 2'-fluorouridine
  modified_base 17: mod_base = gm
  modified_base 18: mod_base = OTHER; note = 2'-fluoroguanosine
  modified_base 19: mod_base = gm
  modified_base 20: mod_base = OTHER; note = 2'-fluoroguanosine
  modified_base 20^21: mod_base = OTHER; note = phosphorothioate linkage
  modified_base 21: mod_base = um
  source 1..21: mol_type = other RNA
atccaaaacgtggattggggt

SEQ ID NO: 642 - RNA, 21 nt, synthetic construct
  modified_base 1: mod_base = um
  modified_base 1^2: mod_base = OTHER; note = phosphorothioate linkage
  modified_base 2: mod_base = OTHER; note = 2'-fluorocytidine
  modified_base 2^3: mod_base = OTHER; note = phosphorothioate linkage
  modified_base 3: mod_base = OTHER; note = 2'-O-methyladenosine
  modified_base 3^4: mod_base = OTHER; note = phosphorothioate linkage
  modified_base 4: mod_base = OTHER; note = 2'-fluorouridine
  modified_base 5: mod_base = cm
  modified_base 6: mod_base = OTHER; note = 2'-fluorocytidine
  modified_base 7: mod_base = OTHER; note = 2'-O-methyladenosine
  modified_base 8: mod_base = OTHER; note = 2'-fluoroadenosine
  modified_base 9: mod_base = OTHER; note = 2'-O-methyladenosine
  modified_base 10: mod_base = OTHER; note = 2'-fluoroadenosine
  modified_base 11: mod_base = cm
  modified_base 12: mod_base = OTHER; note = 2'-fluoroguanosine
  modified_base 13: mod_base = um
  modified_base 14: mod_base = OTHER; note = 2'-fluoroguanosine
  modified_base 15: mod_base = gm
  modified_base 16: mod_base = OTHER; note = 2'-fluoroadenosine
  modified_base 17: mod_base = um
  modified_base 18: mod_base = OTHER; note = 2'-fluorouridine
  modified_base 19: mod_base = gm
  modified_base 20: mod_base = OTHER; note = 2'-fluoroguanosine
  modified_base 20^21: mod_base = OTHER; note = phosphorothioate linkage
  modified_base 21: mod_base = gm
  source 1..21: mol_type = other RNA
tcatccaaaacgtggattggg

SEQ ID NO: 643 - RNA, 21 nt, synthetic construct
  modified_base 1: mod_base = um
  modified_base 1^2: mod_base = OTHER; note = phosphorothioate linkage
  modified_base 2: mod_base = OTHER; note = 2'-fluorocytidine
  modified_base 2^3: mod_base = OTHER; note = phosphorothioate linkage
  modified_base 3: mod_base = OTHER; note = 2'-O-methyladenosine
  modified_base 3^4: mod_base = OTHER; note = phosphorothioate linkage
  modified_base 4: mod_base = OTHER; note = 2'-fluorouridine
  modified_base 5: mod_base = um
  modified_base 6: mod_base = OTHER; note = 2'-fluorocytidine
  modified_base 7: mod_base = OTHER; note = 2'-O-methyladenosine
  modified_base 8: mod_base = OTHER; note = 2'-fluorocytidine
  modified_base 9: mod_base = cm
  modified_base 10: mod_base = OTHER; note = 2'-fluoroadenosine
  modified_base 11: mod_base = OTHER; note = 2'-O-methyladenosine
  modified_base 12: mod_base = OTHER; note = 2'-fluorocytidine
  modified_base 13: mod_base = OTHER; note = 2'-O-methyladenosine
  modified_base 14: mod_base = OTHER; note = 2'-fluorocytidine
  modified_base 15: mod_base = gm
  modified_base 16: mod_base = OTHER; note = 2'-fluorouridine
  modified_base 17: mod_base = cm
  modified_base 18: mod_base = OTHER; note = 2'-fluorocytidine
  modified_base 19: mod_base = cm
  modified_base 20: mod_base = OTHER; note = 2'-fluorouridine
  modified_base 20^21: mod_base = OTHER; note = phosphorothioate linkage
  modified_base 21: mod_base = cm
  source 1..21: mol_type = other RNA
tcattcaccaacacgtccctc

SEQ ID NO: 644 - RNA, 21 nt, synthetic construct
  modified_base 1: mod_base = OTHER; note = 2'-O-methyladenosine
  modified_base 1^2: mod_base = OTHER; note = phosphorothioate linkage
  modified_base 2: mod_base = OTHER; note = 2'-fluoroguanosine
  modified_base 2^3: mod_base = OTHER; note = phosphorothioate linkage
  modified_base 3: mod_base = gm
  modified_base 3^4: mod_base = OTHER; note = phosphorothioate linkage
  modified_base 4: mod_base = OTHER; note = 2'-fluorouridine
  modified_base 5: mod_base = OTHER; note = 2'-O-methyladenosine
  modified_base 6: mod_base = OTHER; note = 2'-fluorocytidine
  modified_base 7: mod_base = OTHER; note = 2'-O-methyladenosine
  modified_base 8: mod_base = OTHER; note = 2'-fluoroguanosine
  modified_base 9: mod_base = gm
  modified_base 10: mod_base = OTHER; note = 2'-fluorouridine
  modified_base 11: mod_base = OTHER; note = 2'-O-methyladenosine
  modified_base 12: mod_base = OTHER; note = 2'-fluoroguanosine
  modified_base 13: mod_base = um
  modified_base 14: mod_base = OTHER; note = 2'-fluorouridine
  modified_base 15: mod_base = cm
  modified_base 16: mod_base = OTHER; note = 2'-fluorouridine
  modified_base 17: mod_base = cm
  modified_base 18: mod_base = OTHER; note = 2'-fluoroadenosine
  modified_base 19: mod_base = um
  modified_base 20: mod_base = OTHER; note = 2'-fluorocytidine
  modified_base 20^21: mod_base = OTHER; note = phosphorothioate linkage
  modified_base 21: mod_base = cm
  source 1..21: mol_type = other RNA
aggtacaggtagttctcatcc

SEQ ID NO: 645 - RNA, 21 nt, synthetic construct
  modified_base 1: mod_base = OTHER; note = 2'-O-methyladenosine
  modified_base 1^2: mod_base = OTHER; note = phosphorothioate linkage
  modified_base 2: mod_base = OTHER; note = 2'-fluorocytidine
  modified_base 2^3: mod_base = OTHER; note = phosphorothioate linkage
  modified_base 3: mod_base = gm
  modified_base 3^4: mod_base = OTHER; note = phosphorothioate linkage
  modified_base 4: mod_base = OTHER; note = 2'-fluorouridine
  modified_base 5: mod_base = OTHER; note = 2'-O-methyladenosine
  modified_base 6: mod_base = OTHER; note = 2'-fluoroadenosine
  modified_base 7: mod_base = um
  modified_base 8: mod_base = OTHER; note = 2'-fluoroadenosine
  modified_base 9: mod_base = cm
  modified_base 10: mod_base = OTHER; note = 2'-fluorouridine
  modified_base 11: mod_base = cm
  modified_base 12: mod_base = OTHER; note = 2'-fluorocytidine
  modified_base 13: mod_base = OTHER; note = 2'-O-methyladenosine
  modified_base 14: mod_base = OTHER; note = 2'-fluorouridine
  modified_base 15: mod_base = gm
  modified_base 16: mod_base = OTHER; note = 2'-fluoroadenosine
  modified_base 17: mod_base = cm
  modified_base 18: mod_base = OTHER; note = 2'-fluorocytidine
  modified_base 19: mod_base = OTHER; note = 2'-O-methyladenosine
  modified_base 20: mod_base = OTHER; note = 2'-fluoroguanosine
  modified_base 20^21: mod_base = OTHER; note = phosphorothioate linkage
  modified_base 21: mod_base = gm
  source 1..21: mol_type = other RNA
acgtaatactccatgaccagg

SEQ ID NO: 646 - RNA, 21 nt, synthetic construct
  modified_base 1: mod_base = OTHER; note = 2'-O-methyladenosine
  modified_base 1^2: mod_base = OTHER; note = phosphorothioate linkage
  modified_base 2: mod_base = OTHER; note = 2'-fluorouridine
  modified_base 2^3: mod_base = OTHER; note = phosphorothioate linkage
  modified_base 3: mod_base = gm
  modified_base 3^4: mod_base = OTHER; note = phosphorothioate linkage
  modified_base 4: mod_base = OTHER; note = 2'-fluorouridine
  modified_base 5: mod_base = um
  modified_base 6: mod_base = OTHER; note = 2'-fluoroguanosine
  modified_base 7: mod_base = um
  modified_base 8: mod_base = OTHER; note = 2'-fluorocytidine
  modified_base 9: mod_base = gm
  modified_base 10: mod_base = OTHER; note = 2'-fluoroguanosine
  modified_base 11: mod_base = gm
  modified_base 12: mod_base = OTHER; note = 2'-fluorouridine
  modified_base 13: mod_base = um
  modified_base 14: mod_base = OTHER; note = 2'-fluorouridine
  modified_base 15: mod_base = gm
  modified_base 16: mod_base = OTHER; note = 2'-fluoroadenosine
  modified_base 17: mod_base = um
  modified_base 18: mod_base = OTHER; note = 2'-fluoroguanosine
  modified_base 19: mod_base = um
  modified_base 20: mod_base = OTHER; note = 2'-fluorocytidine
  modified_base 20^21: mod_base = OTHER; note = phosphorothioate linkage
  modified_base 21: mod_base = cm
  source 1..21: mol_type = other RNA
atgttgtcgggtttgatgtcc

SEQ ID NO: 647 - RNA, 21 nt, synthetic construct
  modified_base 1: mod_base = um
  modified_base 1^2: mod_base = OTHER; note = phosphorothioate linkage
  modified_base 2: mod_base = OTHER; note = 2'-fluorouridine
  modified_base 2^3: mod_base = OTHER; note = phosphorothioate linkage
  modified_base 3: mod_base = gm
  modified_base 3^4: mod_base = OTHER; note = phosphorothioate linkage
  modified_base 4: mod_base = OTHER; note = 2'-fluorouridine
  modified_base 5: mod_base = OTHER; note = 2'-O-methyladenosine
  modified_base 6: mod_base = OTHER; note = 2'-fluoroguanosine
  modified_base 7: mod_base = um
  modified_base 8: mod_base = OTHER; note = 2'-fluoroguanosine
  modified_base 9: mod_base = gm
  modified_base 10: mod_base = OTHER; note = 2'-fluoroadenosine
  modified_base 11: mod_base = cm
  modified_base 12: mod_base = OTHER; note = 2'-fluoroguanosine
  modified_base 13: mod_base = OTHER; note = 2'-O-methyladenosine
  modified_base 14: mod_base = OTHER; note = 2'-fluorouridine
  modified_base 15: mod_base = cm
  modified_base 16: mod_base = OTHER; note = 2'-fluorouridine
  modified_base 17: mod_base = um
  modified_base 18: mod_base = OTHER; note = 2'-fluoroguanosine
  modified_base 19: mod_base = cm
  modified_base 20: mod_base = OTHER; note = 2'-fluorocytidine
  modified_base 20^21: mod_base = OTHER; note = phosphorothioate linkage
  modified_base 21: mod_base = OTHER; note = 2'-O-methyladenosine
  source 1..21: mol_type = other RNA
ttgtagtggacgatcttgcca

SEQ ID NO: 648 - RNA, 21 nt, synthetic construct
  modified_base 1: mod_base = um
  modified_base 1^2: mod_base = OTHER; note = phosphorothioate linkage
  modified_base 2: mod_base = OTHER; note = 2'-fluorocytidine
  modified_base 2^3: mod_base = OTHER; note = phosphorothioate linkage
  modified_base 3: mod_base = gm
  modified_base 3^4: mod_base = OTHER; note = phosphorothioate linkage
  modified_base 4: mod_base = OTHER; note = 2'-fluoroadenosine
  modified_base 5: mod_base = OTHER; note = 2'-O-methyladenosine
  modified_base 6: mod_base = OTHER; note = 2'-fluoroadenosine
  modified_base 7: mod_base = um
  modified_base 8: mod_base = OTHER; note = 2'-fluorocytidine
  modified_base 9: mod_base = cm
  modified_base 10: mod_base = OTHER; note = 2'-fluoroguanosine
  modified_base 11: mod_base = gm
  modified_base 12: mod_base = OTHER; note = 2'-fluorouridine
  modified_base 13: mod_base = gm
  modified_base 14: mod_base = OTHER; note = 2'-fluorouridine
  modified_base 15: mod_base = OTHER; note = 2'-O-methyladenosine
  modified_base 16: mod_base = OTHER; note = 2'-fluoroadenosine
  modified_base 17: mod_base = OTHER; note = 2'-O-methyladenosine
  modified_base 18: mod_base = OTHER; note = 2'-fluoroguanosine
  modified_base 19: mod_base = gm
  modified_base 20: mod_base = OTHER; note = 2'-fluoroguanosine
  modified_base 20^21: mod_base = OTHER; note = phosphorothioate linkage
  modified_base 21: mod_base = gm
  source 1..21: mol_type = other RNA
tcgaaatccggtgtaaagggg

SEQ ID NO: 649 - RNA, 21 nt, synthetic construct
  modified_base 1: mod_base = OTHER; note = 2'-O-methyladenosine
  modified_base 1^2: mod_base = OTHER; note = phosphorothioate linkage
  modified_base 2: mod_base = OTHER; note = 2'-fluoroadenosine
  modified_base 2^3: mod_base = OTHER; note = phosphorothioate linkage
  modified_base 3: mod_base = gm
  modified_base 3^4: mod_base = OTHER; note = phosphorothioate linkage
  modified_base 4: mod_base = OTHER; note = 2'-fluorouridine
  modified_base 5: mod_base = cm
  modified_base 6: mod_base = OTHER; note = 2'-fluoroguanosine
  modified_base 7: mod_base = OTHER; note = 2'-O-methyladenosine
  modified_base 8: mod_base = OTHER; note = 2'-fluoroadenosine
  modified_base 9: mod_base = gm
  modified_base 10: mod_base = OTHER; note = 2'-fluorouridine
  modified_base 11: mod_base = um
  modified_base 12: mod_base = OTHER; note = 2'-fluoroguanosine
  modified_base 13: mod_base = cm
  modified_base 14: mod_base = OTHER; note = 2'-fluoroadenosine
  modified_base 15: mod_base = um
  modified_base 16: mod_base = OTHER; note = 2'-fluoroguanosine
  modified_base 17: mod_base = um
  modified_base 18: mod_base = OTHER; note = 2'-fluoroguanosine
  modified_base 19: mod_base = um
  modified_base 20: mod_base = OTHER; note = 2'-fluorocytidine
  modified_base 20^21: mod_base = OTHER; note = phosphorothioate linkage
  modified_base 21: mod_base = gm
  source 1..21: mol_type = other RNA
aagtcgaagttgcatgtgtcg

SEQ ID NO: 650 - RNA, 21 nt, synthetic construct
  modified_base 1: mod_base = um
  modified_base 1^2: mod_base = OTHER; note = phosphorothioate linkage
  modified_base 2: mod_base = OTHER; note = 2'-fluoroguanosine
  modified_base 2^3: mod_base = OTHER; note = phosphorothioate linkage
  modified_base 3: mod_base = OTHER; note = 2'-O-methyladenosine
  modified_base 3^4: mod_base = OTHER; note = phosphorothioate linkage
  modified_base 4: mod_base = OTHER; note = 2'-fluoroadenosine
  modified_base 5: mod_base = gm
  modified_base 6: mod_base = OTHER; note = 2'-fluoroadenosine
  modified_base 7: mod_base = cm
  modified_base 8: mod_base = OTHER; note = 2'-fluoroadenosine
  modified_base 9: mod_base = gm
  modified_base 10: mod_base = OTHER; note = 2'-fluorouridine
  modified_base 11: mod_base = um
  modified_base 12: mod_base = OTHER; note = 2'-fluorocytidine
  modified_base 13: mod_base = um
  modified_base 14: mod_base = OTHER; note = 2'-fluoroadenosine
  modified_base 15: mod_base = gm
  modified_base 16: mod_base = OTHER; note = 2'-fluoroguanosine
  modified_base 17: mod_base = gm
  modified_base 18: mod_base = OTHER; note = 2'-fluorouridine
  modified_base 19: mod_base = um
  modified_base 20: mod_base = OTHER; note = 2'-fluorocytidine
  modified_base 20^21: mod_base = OTHER; note = phosphorothioate linkage
  modified_base 21: mod_base = cm
  source 1..21: mol_type = other RNA
tgaagacagttctagggttcc

SEQ ID NO: 651 - RNA, 21 nt, synthetic construct
  modified_base 1: mod_base = um
  modified_base 1^2: mod_base = OTHER; note = phosphorothioate linkage
  modified_base 2: mod_base = OTHER; note = 2'-fluorocytidine
  modified_base 2^3: mod_base = OTHER; note = phosphorothioate linkage
  modified_base 3: mod_base = OTHER; note = 2'-O-methyladenosine
  modified_base 3^4: mod_base = OTHER; note = phosphorothioate linkage
  modified_base 4: mod_base = OTHER; note = 2'-fluoroadenosine
  modified_base 5: mod_base = OTHER; note = 2'-O-methyladenosine
  modified_base 6: mod_base = OTHER; note = 2'-fluorouridine
  modified_base 7: mod_base = um
  modified_base 8: mod_base = OTHER; note = 2'-fluorouridine
  modified_base 9: mod_base = cm
  modified_base 10: mod_base = OTHER; note = 2'-fluorocytidine
  modified_base 11: mod_base = cm
  modified_base 12: mod_base = OTHER; note = 2'-fluoroguanosine
  modified_base 13: mod_base = OTHER; note = 2'-O-methyladenosine
  modified_base 14: mod_base = OTHER; note = 2'-fluoroguanosine
  modified_base 15: mod_base = um
  modified_base 16: mod_base = OTHER; note = 2'-fluoroadenosine
  modified_base 17: mod_base = OTHER; note = 2'-O-methyladenosine
  modified_base 18: mod_base = OTHER; note = 2'-fluoroguanosine
  modified_base 19: mod_base = cm
  modified_base 20: mod_base = OTHER; note = 2'-fluoroadenosine
  modified_base 20^21: mod_base = OTHER; note = phosphorothioate linkage
  modified_base 21: mod_base = gm
  source 1..21: mol_type = other RNA
tcaaatttcccgagtaagcag

SEQ ID NO: 652 - RNA, 21 nt, synthetic construct
  modified_base 1: mod_base = um
  modified_base 1^2: mod_base = OTHER; note = phosphorothioate linkage
  modified_base 2: mod_base = OTHER; note = 2'-fluorouridine
  modified_base 2^3: mod_base = OTHER; note = phosphorothioate linkage
  modified_base 3: mod_base = cm
  modified_base 3^4: mod_base = OTHER; note = phosphorothioate linkage
  modified_base 4: mod_base = OTHER; note = 2'-fluoroadenosine
  modified_base 5: mod_base = OTHER; note = 2'-O-methyladenosine
  modified_base 6: mod_base = OTHER; note = 2'-fluorouridine
  modified_base 7: mod_base = OTHER; note = 2'-O-methyladenosine
  modified_base 8: mod_base = OTHER; note = 2'-fluoroadenosine
  modified_base 9: mod_base = OTHER; note = 2'-O-methyladenosine
  modified_base 10: mod_base = OTHER; note = 2'-fluorouridine
  modified_base 11: mod_base = OTHER; note = 2'-O-methyladenosine
  modified_base 12: mod_base = OTHER; note = 2'-fluorouridine
  modified_base 13: mod_base = cm
  modified_base 14: mod_base = OTHER; note = 2'-fluorocytidine
  modified_base 15: mod_base = OTHER; note = 2'-O-methyladenosine
  modified_base 16: mod_base = OTHER; note = 2'-fluoroadenosine
  modified_base 17: mod_base = OTHER; note = 2'-O-methyladenosine
  modified_base 18: mod_base = OTHER; note = 2'-fluorocytidine
  modified_base 19: mod_base = cm
  modified_base 20: mod_base = OTHER; note = 2'-fluoroguanosine
  modified_base 20^21: mod_base = OTHER; note = phosphorothioate linkage
  modified_base 21: mod_base = cm
  source 1..21: mol_type = other RNA
ttcaataaatatccaaaccgc

SEQ ID NO: 653 - RNA, 21 nt, synthetic construct
  modified_base 1: mod_base = OTHER; note = 2'-O-methyladenosine
  modified_base 1^2: mod_base = OTHER; note = phosphorothioate linkage
  modified_base 2: mod_base = OTHER; note = 2'-fluorocytidine
  modified_base 2^3: mod_base = OTHER; note = phosphorothioate linkage
  modified_base 3: mod_base = OTHER; note = 2'-O-methyladenosine
  modified_base 3^4: mod_base = OTHER; note = phosphorothioate linkage
  modified_base 4: mod_base = OTHER; note = 2'-fluoroadenosine
  modified_base 5: mod_base = um
  modified_base 6: mod_base = OTHER; note = 2'-fluoroadenosine
  modified_base 7: mod_base = OTHER; note = 2'-O-methyladenosine
  modified_base 8: mod_base = OTHER; note = 2'-fluoroadenosine
  modified_base 9: mod_base = um
  modified_base 10: mod_base = OTHER; note = 2'-fluoroadenosine
  modified_base 11: mod_base = cm
  modified_base 12: mod_base = OTHER; note = 2'-fluorocytidine
  modified_base 13: mod_base = gm
  modified_base 14: mod_base = OTHER; note = 2'-fluoroadenosine
  modified_base 15: mod_base = gm
  modified_base 16: mod_base = OTHER; note = 2'-fluoroguanosine
  modified_base 17: mod_base = OTHER; note = 2'-O-methyladenosine
  modified_base 18: mod_base = OTHER; note = 2'-fluoroadenosine
  modified_base 19: mod_base = um
  modified_base 20: mod_base = OTHER; note = 2'-fluoroguanosine
  modified_base 20^21: mod_base = OTHER; note = phosphorothioate linkage
  modified_base 21: mod_base = cm
  source 1..21: mol_type = other RNA
acaataaataccgaggaatgc

SEQ ID NO: 654 - RNA, 21 nt, synthetic construct
  modified_base 1: mod_base = um
  modified_base 1^2: mod_base = OTHER; note = phosphorothioate linkage
  modified_base 2: mod_base = OTHER; note = 2'-fluoroguanosine
  modified_base 2^3: mod_base = OTHER; note = phosphorothioate linkage
  modified_base 3: mod_base = cm
  modified_base 3^4: mod_base = OTHER; note = phosphorothioate linkage
  modified_base 4: mod_base = OTHER; note = 2'-fluorocytidine
  modified_base 5: mod_base = um
  modified_base 6: mod_base = OTHER; note = 2'-fluorouridine
  modified_base 7: mod_base = um
  modified_base 8: mod_base = OTHER; note = 2'-fluorouridine
  modified_base 9: mod_base = OTHER; note = 2'-O-methyladenosine
  modified_base 10: mod_base = OTHER; note = 2'-fluorouridine
  modified_base 11: mod_base = um
  modified_base 12: mod_base = OTHER; note = 2'-fluorocytidine
  modified_base 13: mod_base = gm
  modified_base 14: mod_base = OTHER; note = 2'-fluorocytidine
  modified_base 15: mod_base = gm
  modified_base 16: mod_base = OTHER; note = 2'-fluoroadenosine
  modified_base 17: mod_base = gm
  modified_base 18: mod_base = OTHER; note = 2'-fluoroguanosine
  modified_base 19: mod_base = gm
  modified_base 20: mod_base = OTHER; note = 2'-fluorouridine
  modified_base 20^21: mod_base = OTHER; note = phosphorothioate linkage
  modified_base 21: mod_base = cm
  source 1..21: mol_type = other RNA
tgccttttattcgcgagggtc

SEQ ID NO: 655 - RNA, 21 nt, synthetic construct
  modified_base 1: mod_base = OTHER; note = 5 -cyclopropyl phosphonate-2 -O-methyluridine
  modified_base 1^2: mod_base = OTHER; note = phosphorothioate linkage
  modified_base 2: mod_base = OTHER; note = 2'-fluoroadenosine
  modified_base 2^3: mod_base = OTHER; note = phosphorothioate linkage
  modified_base 3: mod_base = OTHER; note = 2'-O-methyladenosine
  modified_base 3^4: mod_base = OTHER; note = phosphorothioate linkage
  modified_base 4: mod_base = OTHER; note = 2'-fluoroguanosine
  modified_base 5: mod_base = cm
  modified_base 6: mod_base = OTHER; note = 2'-fluoroadenosine
  modified_base 7: mod_base = cm
  modified_base 8: mod_base = OTHER; note = 2'-fluoroguanosine
  modified_base 9: mod_base = OTHER; note = 2'-O-methyladenosine
  modified_base 10: mod_base = OTHER; note = 2'-fluorocytidine
  modified_base 11: mod_base = OTHER; note = 2'-O-methyladenosine
  modified_base 12: mod_base = OTHER; note = 2'-fluorocytidine
  modified_base 13: mod_base = cm
  modified_base 14: mod_base = OTHER; note = 2'-fluorouridine
  modified_base 15: mod_base = cm
  modified_base 16: mod_base = OTHER; note = 2'-fluoroguanosine
  modified_base 17: mod_base = cm
  modified_base 18: mod_base = OTHER; note = 2'-fluorocytidine
  modified_base 19: mod_base = cm
  modified_base 20: mod_base = OTHER; note = 2'-fluorocytidine
  modified_base 20^21: mod_base = OTHER; note = phosphorothioate linkage
  modified_base 21: mod_base = um
  source 1..21: mol_type = other RNA
taagcacgacacctcgcccct

SEQ ID NO: 656 - RNA, 21 nt, synthetic construct
  modified_base 1: mod_base = OTHER; note = 5 -cyclopropyl phosphonate-2 -O-methyluridine
  modified_base 1^2: mod_base = OTHER; note = phosphorothioate linkage
  modified_base 2: mod_base = OTHER; note = 2'-fluorocytidine
  modified_base 2^3: mod_base = OTHER; note = phosphorothioate linkage
  modified_base 3: mod_base = gm
  modified_base 3^4: mod_base = OTHER; note = phosphorothioate linkage
  modified_base 4: mod_base = OTHER; note = 2'-fluorocytidine
  modified_base 5: mod_base = gm
  modified_base 6: mod_base = OTHER; note = 2'-fluorouridine
  modified_base 7: mod_base = OTHER; note = 2'-O-methyladenosine
  modified_base 8: mod_base = OTHER; note = 2'-fluoroguanosine
  modified_base 9: mod_base = OTHER; note = 2'-O-methyladenosine
  modified_base 10: mod_base = OTHER; note = 2'-fluoroadenosine
  modified_base 11: mod_base = gm
  modified_base 12: mod_base = OTHER; note = 2'-fluoroguanosine
  modified_base 13: mod_base = gm
  modified_base 14: mod_base = OTHER; note = 2'-fluorocytidine
  modified_base 15: mod_base = gm
  modified_base 16: mod_base = OTHER; note = 2'-fluorouridine
  modified_base 17: mod_base = cm
  modified_base 18: mod_base = OTHER; note = 2'-fluorouridine
  modified_base 19: mod_base = gm
  modified_base 20: mod_base = OTHER; note = 2'-fluorocytidine
  modified_base 20^21: mod_base = OTHER; note = phosphorothioate linkage
  modified_base 21: mod_base = cm
  source 1..21: mol_type = other RNA
tcgcgtagaagggcgtctgcc

SEQ ID NO: 657 - RNA, 21 nt, synthetic construct
  modified_base 1: mod_base = OTHER; note = 5 -cyclopropyl phosphonate-2 -O-methyluridine
  modified_base 1^2: mod_base = OTHER; note = phosphorothioate linkage
  modified_base 2: mod_base = OTHER; note = 2'-fluoroadenosine
  modified_base 2^3: mod_base = OTHER; note = phosphorothioate linkage
  modified_base 3: mod_base = OTHER; note = 2'-O-methyladenosine
  modified_base 3^4: mod_base = OTHER; note = phosphorothioate linkage
  modified_base 4: mod_base = OTHER; note = 2'-fluorouridine
  modified_base 5: mod_base = OTHER; note = 2'-O-methyladenosine
  modified_base 6: mod_base = OTHER; note = 2'-fluorocytidine
  modified_base 7: mod_base = cm
  modified_base 8: mod_base = OTHER; note = 2'-fluoroguanosine
  modified_base 9: mod_base = OTHER; note = 2'-O-methyladenosine
  modified_base 10: mod_base = OTHER; note = 2'-fluoroguanosine
  modified_base 11: mod_base = gm
  modified_base 12: mod_base = OTHER; note = 2'-fluoroadenosine
  modified_base 13: mod_base = OTHER; note = 2'-O-methyladenosine
  modified_base 14: mod_base = OTHER; note = 2'-fluorouridine
  modified_base 15: mod_base = gm
  modified_base 16: mod_base = OTHER; note = 2'-fluorouridine
  modified_base 17: mod_base = cm
  modified_base 18: mod_base = OTHER; note = 2'-fluoroguanosine
  modified_base 19: mod_base = gm
  modified_base 20: mod_base = OTHER; note = 2'-fluoroguanosine
  modified_base 20^21: mod_base = OTHER; note = phosphorothioate linkage
  modified_base 21: mod_base = gm
  source 1..21: mol_type = other RNA
taataccgaggaatgtcgggg

SEQ ID NO: 658 - RNA, 21 nt, synthetic construct
  modified_base 1: mod_base = OTHER; note = 5 -cyclopropyl phosphonate-2 -O-methyluridine
  modified_base 1^2: mod_base = OTHER; note = phosphorothioate linkage
  modified_base 2: mod_base = OTHER; note = 2'-fluoroadenosine
  modified_base 2^3: mod_base = OTHER; note = phosphorothioate linkage
  modified_base 3: mod_base = gm
  modified_base 3^4: mod_base = OTHER; note = phosphorothioate linkage
  modified_base 4: mod_base = OTHER; note = 2'-fluoroadenosine
  modified_base 5: mod_base = cm
  modified_base 6: mod_base = OTHER; note = 2'-fluoroadenosine
  modified_base 7: mod_base = OTHER; note = 2'-O-methyladenosine
  modified_base 8: mod_base = OTHER; note = 2'-fluorouridine
  modified_base 9: mod_base = OTHER; note = 2'-O-methyladenosine
  modified_base 10: mod_base = OTHER; note = 2'-fluoroadenosine
  modified_base 11: mod_base = OTHER; note = 2'-O-methyladenosine
  modified_base 12: mod_base = OTHER; note = 2'-fluorouridine
  modified_base 13: mod_base = OTHER; note = 2'-O-methyladenosine
  modified_base 14: mod_base = OTHER; note = 2'-fluorocytidine
  modified_base 15: mod_base = cm
  modified_base 16: mod_base = OTHER; note = 2'-fluoroguanosine
  modified_base 17: mod_base = OTHER; note = 2'-O-methyladenosine
  modified_base 18: mod_base = OTHER; note = 2'-fluoroguanosine
  modified_base 19: mod_base = gm
  modified_base 20: mod_base = OTHER; note = 2'-fluoroadenosine
  modified_base 20^21: mod_base = OTHER; note = phosphorothioate linkage
  modified_base 21: mod_base = OTHER; note = 2'-O-methyladenosine
  source 1..21: mol_type = other RNA
tagacaataaataccgaggaa

SEQ ID NO: 659 - RNA, 21 nt, synthetic construct
  modified_base 1: mod_base = um
  modified_base 1^2: mod_base = OTHER; note = phosphorothioate linkage
  modified_base 2: mod_base = OTHER; note = 2'-fluorouridine
  modified_base 2^3: mod_base = OTHER; note = phosphorothioate linkage
  modified_base 3: mod_base = cm
  modified_base 3^4: mod_base = OTHER; note = phosphorothioate linkage
  modified_base 4: mod_base = OTHER; note = 2'-fluoroadenosine
  modified_base 5: mod_base = cm
  modified_base 6: mod_base = OTHER; note = 2'-fluorouridine
  modified_base 7: mod_base = OTHER; note = 2'-O-methyladenosine
  modified_base 8: mod_base = OTHER; note = 2'-fluorocytidine
  modified_base 9: mod_base = cm
  modified_base 10: mod_base = OTHER; note = 2'-fluoroguanosine
  modified_base 11: mod_base = cm
  modified_base 12: mod_base = OTHER; note = 2'-fluorouridine
  modified_base 13: mod_base = OTHER; note = 2'-O-methyladenosine
  modified_base 14: mod_base = OTHER; note = 2'-fluorocytidine
  modified_base 15: mod_base = cm
  modified_base 16: mod_base = OTHER; note = 2'-fluorouridine
  modified_base 17: mod_base = cm
  modified_base 18: mod_base = OTHER; note = 2'-fluoroguanosine
  modified_base 19: mod_base = cm
  modified_base 20: mod_base = um
  modified_base 20^21: mod_base = OTHER; note = phosphorothioate linkage
  modified_base 21: mod_base = gm
  source 1..21: mol_type = other RNA
ttcactaccgctacctcgctg

SEQ ID NO: 660 - RNA, 21 nt, synthetic construct
  modified_base 1: mod_base = OTHER; note = 2'-O-methyladenosine
  modified_base 1^2: mod_base = OTHER; note = phosphorothioate linkage
  modified_base 2: mod_base = OTHER; note = 2'-fluorouridine
  modified_base 2^3: mod_base = OTHER; note = phosphorothioate linkage
  modified_base 3: mod_base = cm
  modified_base 3^4: mod_base = OTHER; note = phosphorothioate linkage
  modified_base 4: mod_base = OTHER; note = 2'-fluorocytidine
  modified_base 5: mod_base = um
  modified_base 6: mod_base = OTHER; note = 2'-fluoroguanosine
  modified_base 7: mod_base = gm
  modified_base 8: mod_base = OTHER; note = 2'-fluoroadenosine
  modified_base 9: mod_base = OTHER; note = 2'-O-methyladenosine
  modified_base 10: mod_base = OTHER; note = 2'-fluoroguanosine
  modified_base 11: mod_base = gm
  modified_base 12: mod_base = OTHER; note = 2'-fluorocytidine
  modified_base 13: mod_base = gm
  modified_base 14: mod_base = OTHER; note = 2'-fluoroadenosine
  modified_base 15: mod_base = OTHER; note = 2'-O-methyladenosine
  modified_base 16: mod_base = OTHER; note = 2'-fluoroguanosine
  modified_base 17: mod_base = um
  modified_base 18: mod_base = OTHER; note = 2'-fluoroguanosine
  modified_base 19: mod_base = cm
  modified_base 20: mod_base = OTHER; note = 2'-O-methyladenosine
  modified_base 20^21: mod_base = OTHER; note = phosphorothioate linkage
  modified_base 21: mod_base = gm
  source 1..21: mol_type = other RNA
atcctggaaggcgaagtgcag

SEQ ID NO: 661 - RNA, 21 nt, synthetic construct
  modified_base 1: mod_base = um
  modified_base 1^2: mod_base = OTHER; note = phosphorothioate linkage
  modified_base 2: mod_base = OTHER; note = 2'-fluorouridine
  modified_base 2^3: mod_base = OTHER; note = phosphorothioate linkage
  modified_base 3: mod_base = cm
  modified_base 3^4: mod_base = OTHER; note = phosphorothioate linkage
  modified_base 4: mod_base = OTHER; note = 2'-fluoroadenosine
  modified_base 5: mod_base = cm
  modified_base 6: mod_base = OTHER; note = 2'-fluorouridine
  modified_base 7: mod_base = OTHER; note = 2'-O-methyladenosine
  modified_base 8: mod_base = OTHER; note = 2'-fluorocytidine
  modified_base 9: mod_base = cm
  modified_base 10: mod_base = OTHER; note = 2'-fluoroguanosine
  modified_base 11: mod_base = cm
  modified_base 12: mod_base = OTHER; note = 2'-fluorouridine
  modified_base 13: mod_base = OTHER; note = 2'-O-methyladenosine
  modified_base 14: mod_base = OTHER; note = 2'-fluorocytidine
  modified_base 15: mod_base = cm
  modified_base 16: mod_base = OTHER; note = 2'-fluorouridine
  modified_base 17: mod_base = cm
  modified_base 18: mod_base = OTHER; note = 2'-fluoroguanosine
  modified_base 19: mod_base = cm
  modified_base 20: mod_base = OTHER; note = 2'-fluorouridine
  modified_base 20^21: mod_base = OTHER; note = phosphorothioate linkage
  modified_base 21: mod_base = gm
  source 1..21: mol_type = other RNA
ttcactaccgctacctcgctg

SEQ ID NO: 662 - RNA, 21 nt, synthetic construct
  modified_base 1: mod_base = OTHER; note = 2'-O-methyladenosine
  modified_base 1^2: mod_base = OTHER; note = phosphorothioate linkage
  modified_base 2: mod_base = OTHER; note = 2'-fluorouridine
  modified_base 2^3: mod_base = OTHER; note = phosphorothioate linkage
  modified_base 3: mod_base = cm
  modified_base 3^4: mod_base = OTHER; note = phosphorothioate linkage
  modified_base 4: mod_base = OTHER; note = 2'-fluorocytidine
  modified_base 5: mod_base = um
  modified_base 6: mod_base = OTHER; note = 2'-fluoroguanosine
  modified_base 7: mod_base = gm
  modified_base 8: mod_base = OTHER; note = 2'-fluoroadenosine
  modified_base 9: mod_base = OTHER; note = 2'-O-methyladenosine
  modified_base 10: mod_base = OTHER; note = 2'-fluoroguanosine
  modified_base 11: mod_base = gm
  modified_base 12: mod_base = OTHER; note = 2'-fluorocytidine
  modified_base 13: mod_base = gm
  modified_base 14: mod_base = OTHER; note = 2'-fluoroadenosine
  modified_base 15: mod_base = OTHER; note = 2'-O-methyladenosine
  modified_base 16: mod_base = OTHER; note = 2'-fluoroguanosine
  modified_base 17: mod_base = um
  modified_base 18: mod_base = OTHER; note = 2'-fluoroguanosine
  modified_base 19: mod_base = cm
  modified_base 20: mod_base = OTHER; note = 2'-fluoroadenosine
  modified_base 20^21: mod_base = OTHER; note = phosphorothioate linkage
  modified_base 21: mod_base = gm
  source 1..21: mol_type = other RNA
atcctggaaggcgaagtgcag

SEQ ID NO: 663 - RNA, 21 nt, synthetic construct
  modified_base 1: mod_base = um
  modified_base 1^2: mod_base = OTHER; note = phosphorothioate linkage
  modified_base 2: mod_base = OTHER; note = 2'-fluoroadenosine
  modified_base 2^3: mod_base = OTHER; note = phosphorothioate linkage
  modified_base 3: mod_base = OTHER; note = 2'-O-methyladenosine
  modified_base 3^4: mod_base = OTHER; note = phosphorothioate linkage
  modified_base 4: mod_base = OTHER; note = 2'-fluoroguanosine
  modified_base 5: mod_base = cm
  modified_base 6: mod_base = OTHER; note = 2'-fluoroadenosine
  modified_base 7: mod_base = cm
  modified_base 8: mod_base = OTHER; note = 2'-fluoroguanosine
  modified_base 9: mod_base = OTHER; note = 2'-O-methyladenosine
  modified_base 10: mod_base = OTHER; note = 2'-fluorocytidine
  modified_base 11: mod_base = OTHER; note = 2'-O-methyladenosine
  modified_base 12: mod_base = OTHER; note = 2'-fluorocytidine
  modified_base 13: mod_base = cm
  modified_base 14: mod_base = OTHER; note = 2'-fluorouridine
  modified_base 15: mod_base = cm
  modified_base 16: mod_base = OTHER; note = 2'-fluoroguanosine
  modified_base 17: mod_base = cm
  modified_base 18: mod_base = OTHER; note = 2'-fluorocytidine
  modified_base 19: mod_base = cm
  modified_base 20: mod_base = OTHER; note = 2'-fluorocytidine
  modified_base 20^21: mod_base = OTHER; note = phosphorothioate linkage
  modified_base 21: mod_base = um
  source 1..21: mol_type = other RNA
taagcacgacacctcgcccct

SEQ ID NO: 664 - RNA, 21 nt, synthetic construct
  modified_base 1: mod_base = um
  modified_base 1^2: mod_base = OTHER; note = phosphorothioate linkage
  modified_base 2: mod_base = OTHER; note = 2'-fluorocytidine
  modified_base 2^3: mod_base = OTHER; note = phosphorothioate linkage
  modified_base 3: mod_base = gm
  modified_base 3^4: mod_base = OTHER; note = phosphorothioate linkage
  modified_base 4: mod_base = OTHER; note = 2'-fluorocytidine
  modified_base 5: mod_base = gm
  modified_base 6: mod_base = OTHER; note = 2'-fluorouridine
  modified_base 7: mod_base = OTHER; note = 2'-O-methyladenosine
  modified_base 8: mod_base = OTHER; note = 2'-fluoroguanosine
  modified_base 9: mod_base = OTHER; note = 2'-O-methyladenosine
  modified_base 10: mod_base = OTHER; note = 2'-fluoroadenosine
  modified_base 11: mod_base = gm
  modified_base 12: mod_base = OTHER; note = 2'-fluoroguanosine
  modified_base 13: mod_base = gm
  modified_base 14: mod_base = OTHER; note = 2'-fluorocytidine
  modified_base 15: mod_base = gm
  modified_base 16: mod_base = OTHER; note = 2'-fluorouridine
  modified_base 17: mod_base = cm
  modified_base 18: mod_base = OTHER; note = 2'-fluorouridine
  modified_base 19: mod_base = gm
  modified_base 20: mod_base = OTHER; note = 2'-fluorocytidine
  modified_base 20^21: mod_base = OTHER; note = phosphorothioate linkage
  modified_base 21: mod_base = cm
  source 1..21: mol_type = other RNA
tcgcgtagaagggcgtctgcc

SEQ ID NO: 665 - RNA, 21 nt, synthetic construct
  modified_base 1: mod_base = um
  modified_base 1^2: mod_base = OTHER; note = phosphorothioate linkage
  modified_base 2: mod_base = OTHER; note = 2'-fluoroadenosine
  modified_base 2^3: mod_base = OTHER; note = phosphorothioate linkage
  modified_base 3: mod_base = OTHER; note = 2'-O-methyladenosine
  modified_base 3^4: mod_base = OTHER; note = phosphorothioate linkage
  modified_base 4: mod_base = OTHER; note = 2'-fluorouridine
  modified_base 5: mod_base = OTHER; note = 2'-O-methyladenosine
  modified_base 6: mod_base = OTHER; note = 2'-fluorocytidine
  modified_base 7: mod_base = cm
  modified_base 8: mod_base = OTHER; note = 2'-fluoroguanosine
  modified_base 9: mod_base = OTHER; note = 2'-O-methyladenosine
  modified_base 10: mod_base = OTHER; note = 2'-fluoroguanosine
  modified_base 11: mod_base = gm
  modified_base 12: mod_base = OTHER; note = 2'-fluoroadenosine
  modified_base 13: mod_base = OTHER; note = 2'-O-methyladenosine
  modified_base 14: mod_base = OTHER; note = 2'-fluorouridine
  modified_base 15: mod_base = gm
  modified_base 16: mod_base = OTHER; note = 2'-fluorouridine
  modified_base 17: mod_base = cm
  modified_base 18: mod_base = OTHER; note = 2'-fluoroguanosine
  modified_base 19: mod_base = gm
  modified_base 20: mod_base = OTHER; note = 2'-fluoroguanosine
  modified_base 20^21: mod_base = OTHER; note = phosphorothioate linkage
  modified_base 21: mod_base = gm
  source 1..21: mol_type = other RNA
taataccgaggaatgtcgggg

SEQ ID NO: 666 - RNA, 21 nt, synthetic construct
  modified_base 1: mod_base = um
  modified_base 1^2: mod_base = OTHER; note = phosphorothioate linkage
  modified_base 2: mod_base = OTHER; note = 2'-fluoroadenosine
  modified_base 2^3: mod_base = OTHER; note = phosphorothioate linkage
  modified_base 3: mod_base = gm
  modified_base 3^4: mod_base = OTHER; note = phosphorothioate linkage
  modified_base 4: mod_base = OTHER; note = 2'-fluoroadenosine
  modified_base 5: mod_base = cm
  modified_base 6: mod_base = OTHER; note = 2'-fluoroadenosine
  modified_base 7: mod_base = OTHER; note = 2'-O-methyladenosine
  modified_base 8: mod_base = OTHER; note = 2'-fluorouridine
  modified_base 9: mod_base = OTHER; note = 2'-O-methyladenosine
  modified_base 10: mod_base = OTHER; note = 2'-fluoroadenosine
  modified_base 11: mod_base = OTHER; note = 2'-O-methyladenosine
  modified_base 12: mod_base = OTHER; note = 2'-fluorouridine
  modified_base 13: mod_base = OTHER; note = 2'-O-methyladenosine
  modified_base 14: mod_base = OTHER; note = 2'-fluorocytidine
  modified_base 15: mod_base = cm
  modified_base 16: mod_base = OTHER; note = 2'-fluoroguanosine
  modified_base 17: mod_base = OTHER; note = 2'-O-methyladenosine
  modified_base 18: mod_base = OTHER; note = 2'-fluoroguanosine
  modified_base 19: mod_base = gm
  modified_base 20: mod_base = OTHER; note = 2'-fluoroadenosine
  modified_base 20^21: mod_base = OTHER; note = phosphorothioate linkage
  modified_base 21: mod_base = OTHER; note = 2'-O-methyladenosine
  source 1..21: mol_type = other RNA
tagacaataaataccgaggaa

SEQ ID NO: 667 - RNA, 21 nt, synthetic construct
  modified_base 1: mod_base = um
  modified_base 1^2: mod_base = OTHER; note = phosphorothioate linkage
  modified_base 2: mod_base = OTHER; note = 2'-fluorocytidine
  modified_base 2^3: mod_base = OTHER; note = phosphorothioate linkage
  modified_base 3: mod_base = OTHER; note = 2'-O-methyladenosine
  modified_base 3^4: mod_base = OTHER; note = phosphorothioate linkage
  modified_base 4: mod_base = OTHER; note = 2'-fluoroadenosine
  modified_base 5: mod_base = OTHER; note = 2'-O-methyladenosine
  modified_base 6: mod_base = OTHER; note = 2'-fluoroadenosine
  modified_base 7: mod_base = gm
  modified_base 8: mod_base = OTHER; note = 2'-fluorocytidine
  modified_base 9: mod_base = OTHER; note = 2'-O-methyladenosine
  modified_base 10: mod_base = OTHER; note = 2'-fluoroadenosine
  modified_base 11: mod_base = OTHER; note = 2'-O-methyladenosine
  modified_base 12: mod_base = OTHER; note = 2'-fluorouridine
  modified_base 13: mod_base = um
  modified_base 14: mod_base = OTHER; note = 2'-fluorouridine
  modified_base 15: mod_base = cm
  modified_base 16: mod_base = OTHER; note = 2'-fluorocytidine
  modified_base 17: mod_base = cm
  modified_base 18: mod_base = OTHER; note = 2'-fluoroguanosine
  modified_base 19: mod_base = OTHER; note = 2'-O-methyladenosine
  modified_base 20: mod_base = OTHER; note = 2'-fluoroguanosine
  modified_base 20^21: mod_base = OTHER; note = phosphorothioate linkage
  modified_base 21: mod_base = um
  source 1..21: mol_type = other RNA
tcaaaagcaaatttcccgagt

SEQ ID NO: 668 - RNA, 21 nt, synthetic construct
  modified_base 1: mod_base = um
  modified_base 1^2: mod_base = OTHER; note = phosphorothioate linkage
  modified_base 2: mod_base = OTHER; note = 2'-fluorouridine
  modified_base 2^3: mod_base = OTHER; note = phosphorothioate linkage
  modified_base 3: mod_base = um
  modified_base 3^4: mod_base = OTHER; note = phosphorothioate linkage
  modified_base 4: mod_base = OTHER; note = 2'-fluorouridine
  modified_base 5: mod_base = gm
  modified_base 6: mod_base = OTHER; note = 2'-fluoroguanosine
  modified_base 7: mod_base = cm
  modified_base 8: mod_base = OTHER; note = 2'-fluoroadenosine
  modified_base 9: mod_base = OTHER; note = 2'-O-methyladenosine
  modified_base 10: mod_base = OTHER; note = 2'-fluoroadenosine
  modified_base 11: mod_base = OTHER; note = 2'-O-methyladenosine
  modified_base 12: mod_base = OTHER; note = 2'-fluoroguanosine
  modified_base 13: mod_base = cm
  modified_base 14: mod_base = OTHER; note = 2'-fluoroadenosine
  modified_base 15: mod_base = OTHER; note = 2'-O-methyladenosine
  modified_base 16: mod_base = OTHER; note = 2'-fluoroadenosine
  modified_base 17: mod_base = um
  modified_base 18: mod_base = OTHER; note = 2'-fluorouridine
  modified_base 19: mod_base = um
  modified_base 20: mod_base = OTHER; note = 2'-fluorocytidine
  modified_base 20^21: mod_base = OTHER; note = phosphorothioate linkage
  modified_base 21: mod_base = cm
  source 1..21: mol_type = other RNA
ttttggcaaaagcaaatttcc

SEQ ID NO: 669 - RNA, 21 nt, synthetic construct
  modified_base 1: mod_base = OTHER; note = 2'-O-methyladenosine
  modified_base 1^2: mod_base = OTHER; note = phosphorothioate linkage
  modified_base 2: mod_base = OTHER; note = 2'-fluoroadenosine
  modified_base 2^3: mod_base = OTHER; note = phosphorothioate linkage
  modified_base 3: mod_base = um
  modified_base 3^4: mod_base = OTHER; note = phosphorothioate linkage
  modified_base 4: mod_base = OTHER; note = 2'-fluoroadenosine
  modified_base 5: mod_base = OTHER; note = 2'-O-methyladenosine
  modified_base 6: mod_base = OTHER; note = 2'-fluoroadenosine
  modified_base 7: mod_base = um
  modified_base 8: mod_base = OTHER; note = 2'-fluoroadenosine
  modified_base 9: mod_base = um
  modified_base 10: mod_base = OTHER; note = 2'-fluorocytidine
  modified_base 11: mod_base = cm
  modified_base 12: mod_base = OTHER; note = 2'-fluoroadenosine
  modified_base 13: mod_base = OTHER; note = 2'-O-methyladenosine
  modified_base 14: mod_base = OTHER; note = 2'-fluoroadenosine
  modified_base 15: mod_base = cm
  modified_base 16: mod_base = OTHER; note = 2'-fluorocytidine
  modified_base 17: mod_base = gm
  modified_base 18: mod_base = OTHER; note = 2'-fluorocytidine
  modified_base 19: mod_base = cm
  modified_base 20: mod_base = OTHER; note = 2'-fluoroguanosine
  modified_base 20^21: mod_base = OTHER; note = phosphorothioate linkage
  modified_base 21: mod_base = OTHER; note = 2'-O-methyladenosine
  source 1..21: mol_type = other RNA
aataaatatccaaaccgccga

SEQ ID NO: 670 - RNA, 21 nt, synthetic construct
  modified_base 1: mod_base = um
  modified_base 1^2: mod_base = OTHER; note = phosphorothioate linkage
  modified_base 2: mod_base = OTHER; note = 2'-fluoroadenosine
  modified_base 2^3: mod_base = OTHER; note = phosphorothioate linkage
  modified_base 3: mod_base = OTHER; note = 2'-O-methyladenosine
  modified_base 3^4: mod_base = OTHER; note = phosphorothioate linkage
  modified_base 4: mod_base = OTHER; note = 2'-fluorouridine
  modified_base 5: mod_base = OTHER; note = 2'-O-methyladenosine
  modified_base 6: mod_base = OTHER; note = 2'-fluoroadenosine
  modified_base 7: mod_base = OTHER; note = 2'-O-methyladenosine
  modified_base 8: mod_base = OTHER; note = 2'-fluorouridine
  modified_base 9: mod_base = OTHER; note = 2'-O-methyladenosine
  modified_base 10: mod_base = OTHER; note = 2'-fluorouridine
  modified_base 11: mod_base = cm
  modified_base 12: mod_base = OTHER; note = 2'-fluorocytidine
  modified_base 13: mod_base = OTHER; note = 2'-O-methyladenosine
  modified_base 14: mod_base = OTHER; note = 2'-fluoroadenosine
  modified_base 15: mod_base = OTHER; note = 2'-O-methyladenosine
  modified_base 16: mod_base = OTHER; note = 2'-fluorocytidine
  modified_base 17: mod_base = cm
  modified_base 18: mod_base = OTHER; note = 2'-fluoroguanosine
  modified_base 19: mod_base = cm
  modified_base 20: mod_base = OTHER; note = 2'-fluorocytidine
  modified_base 20^21: mod_base = OTHER; note = phosphorothioate linkage
  modified_base 21: mod_base = gm
  source 1..21: mol_type = other RNA
taataaatatccaaaccgccg

SEQ ID NO: 671 - RNA, 21 nt, synthetic construct
  modified_base 1: mod_base = um
  modified_base 1^2: mod_base = OTHER; note = phosphorothioate linkage
  modified_base 2: mod_base = OTHER; note = 2'-fluorocytidine
  modified_base 2^3: mod_base = OTHER; note = phosphorothioate linkage
  modified_base 3: mod_base = cm
  modified_base 3^4: mod_base = OTHER; note = phosphorothioate linkage
  modified_base 4: mod_base = OTHER; note = 2'-fluoroadenosine
  modified_base 5: mod_base = OTHER; note = 2'-O-methyladenosine
  modified_base 6: mod_base = OTHER; note = 2'-fluoroadenosine
  modified_base 7: mod_base = OTHER; note = 2'-O-methyladenosine
  modified_base 8: mod_base = OTHER; note = 2'-fluorocytidine
  modified_base 9: mod_base = gm
  modified_base 10: mod_base = OTHER; note = 2'-fluorouridine
  modified_base 11: mod_base = gm
  modified_base 12: mod_base = OTHER; note = 2'-fluoroguanosine
  modified_base 13: mod_base = OTHER; note = 2'-O-methyladenosine
  modified_base 14: mod_base = OTHER; note = 2'-fluorouridine
  modified_base 15: mod_base = um
  modified_base 16: mod_base = OTHER; note = 2'-fluoroguanosine
  modified_base 17: mod_base = gm
  modified_base 18: mod_base = OTHER; note = 2'-fluoroguanosine
  modified_base 19: mod_base = gm
  modified_base 20: mod_base = OTHER; note = 2'-fluorouridine
  modified_base 20^21: mod_base = OTHER; note = phosphorothioate linkage
  modified_base 21: mod_base = um
  source 1..21: mol_type = other RNA
tccaaaacgtggattggggtt

SEQ ID NO: 672 - RNA, 21 nt, synthetic construct
  modified_base 1: mod_base = OTHER; note = 2'-O-methyladenosine
  modified_base 1^2: mod_base = OTHER; note = phosphorothioate linkage
  modified_base 2: mod_base = OTHER; note = 2'-fluoroguanosine
  modified_base 2^3: mod_base = OTHER; note = phosphorothioate linkage
  modified_base 3: mod_base = um
  modified_base 3^4: mod_base = OTHER; note = phosphorothioate linkage
  modified_base 4: mod_base = OTHER; note = 2'-fluoroguanosine
  modified_base 5: mod_base = cm
  modified_base 6: mod_base = OTHER; note = 2'-fluoroadenosine
  modified_base 7: mod_base = um
  modified_base 8: mod_base = OTHER; note = 2'-fluorocytidine
  modified_base 9: mod_base = cm
  modified_base 10: mod_base = OTHER; note = 2'-fluoroadenosine
  modified_base 11: mod_base = OTHER; note = 2'-O-methyladenosine
  modified_base 12: mod_base = OTHER; note = 2'-fluoroadenosine
  modified_base 13: mod_base = OTHER; note = 2'-O-methyladenosine
  modified_base 14: mod_base = OTHER; note = 2'-fluorocytidine
  modified_base 15: mod_base = gm
  modified_base 16: mod_base = OTHER; note = 2'-fluorouridine
  modified_base 17: mod_base = gm
  modified_base 18: mod_base = OTHER; note = 2'-fluoroguanosine
  modified_base 19: mod_base = OTHER; note = 2'-O-methyladenosine
  modified_base 20: mod_base = OTHER; note = 2'-fluorouridine
  modified_base 20^21: mod_base = OTHER; note = phosphorothioate linkage
  modified_base 21: mod_base = cm
  source 1..21: mol_type = other RNA
agtgcatccaaaacgtggatc

SEQ ID NO: 673 - RNA, 21 nt, synthetic construct
  modified_base 1: mod_base = um
  modified_base 1^2: mod_base = OTHER; note = phosphorothioate linkage
  modified_base 2: mod_base = OTHER; note = 2'-fluorouridine
  modified_base 2^3: mod_base = OTHER; note = phosphorothioate linkage
  modified_base 3: mod_base = cm
  modified_base 3^4: mod_base = OTHER; note = phosphorothioate linkage
  modified_base 4: mod_base = OTHER; note = 2'-fluorouridine
  modified_base 5: mod_base = cm
  modified_base 6: mod_base = OTHER; note = 2'-fluoroadenosine
  modified_base 7: mod_base = gm
  modified_base 8: mod_base = OTHER; note = 2'-fluorouridine
  modified_base 9: mod_base = gm
  modified_base 10: mod_base = OTHER; note = 2'-fluorocytidine
  modified_base 11: mod_base = OTHER; note = 2'-O-methyladenosine
  modified_base 12: mod_base = OTHER; note = 2'-fluorouridine
  modified_base 13: mod_base = cm
  modified_base 14: mod_base = OTHER; note = 2'-fluorocytidine
  modified_base 15: mod_base = OTHER; note = 2'-O-methyladenosine
  modified_base 16: mod_base = OTHER; note = 2'-fluoroadenosine
  modified_base 17: mod_base = OTHER; note = 2'-O-methyladenosine
  modified_base 18: mod_base = OTHER; note = 2'-fluoroadenosine
  modified_base 19: mod_base = cm
  modified_base 20: mod_base = OTHER; note = 2'-fluoroguanosine
  modified_base 20^21: mod_base = OTHER; note = phosphorothioate linkage
  modified_base 21: mod_base = um
  source 1..21: mol_type = other RNA
ttctcagtgcatccaaaacgt

SEQ ID NO: 674 - RNA, 21 nt, synthetic construct
  modified_base 1: mod_base = um
  modified_base 1^2: mod_base = OTHER; note = phosphorothioate linkage
  modified_base 2: mod_base = OTHER; note = 2'-fluoroguanosine
  modified_base 2^3: mod_base = OTHER; note = phosphorothioate linkage
  modified_base 3: mod_base = um
  modified_base 3^4: mod_base = OTHER; note = phosphorothioate linkage
  modified_base 4: mod_base = OTHER; note = 2'-fluorocytidine
  modified_base 5: mod_base = um
  modified_base 6: mod_base = OTHER; note = 2'-fluorocytidine
  modified_base 7: mod_base = OTHER; note = 2'-O-methyladenosine
  modified_base 8: mod_base = OTHER; note = 2'-fluoroguanosine
  modified_base 9: mod_base = um
  modified_base 10: mod_base = OTHER; note = 2'-fluoroguanosine
  modified_base 11: mod_base = cm
  modified_base 12: mod_base = OTHER; note = 2'-fluoroadenosine
  modified_base 13: mod_base = um
  modified_base 14: mod_base = OTHER; note = 2'-fluorocytidine
  modified_base 15: mod_base = cm
  modified_base 16: mod_base = OTHER; note = 2'-fluoroadenosine
  modified_base 17: mod_base = OTHER; note = 2'-O-methyladenosine
  modified_base 18: mod_base = OTHER; note = 2'-fluoroadenosine
  modified_base 19: mod_base = OTHER; note = 2'-O-methyladenosine
  modified_base 20: mod_base = OTHER; note = 2'-fluorocytidine
  modified_base 20^21: mod_base = OTHER; note = phosphorothioate linkage
  modified_base 21: mod_base = gm
  source 1..21: mol_type = other RNA
tgtctcagtgcatccaaaacg

SEQ ID NO: 675 - RNA, 21 nt, synthetic construct
  modified_base 1: mod_base = OTHER; note = 2'-O-methyladenosine
  modified_base 1^2: mod_base = OTHER; note = phosphorothioate linkage
  modified_base 2: mod_base = OTHER; note = 2'-fluoroguanosine
  modified_base 2^3: mod_base = OTHER; note = phosphorothioate linkage
  modified_base 3: mod_base = OTHER; note = 2'-O-methyladenosine
  modified_base 3^4: mod_base = OTHER; note = phosphorothioate linkage
  modified_base 4: mod_base = OTHER; note = 2'-fluorocytidine
  modified_base 5: mod_base = OTHER; note = 2'-O-methyladenosine
  modified_base 6: mod_base = OTHER; note = 2'-fluoroadenosine
  modified_base 7: mod_base = um
  modified_base 8: mod_base = OTHER; note = 2'-fluoroadenosine
  modified_base 9: mod_base = OTHER; note = 2'-O-methyladenosine
  modified_base 10: mod_base = OTHER; note = 2'-fluoroadenosine
  modified_base 11: mod_base = um
  modified_base 12: mod_base = OTHER; note = 2'-fluoroadenosine
  modified_base 13: mod_base = cm
  modified_base 14: mod_base = OTHER; note = 2'-fluorocytidine
  modified_base 15: mod_base = gm
  modified_base 16: mod_base = OTHER; note = 2'-fluoroadenosine
  modified_base 17: mod_base = gm
  modified_base 18: mod_base = OTHER; note = 2'-fluoroguanosine
  modified_base 19: mod_base = OTHER; note = 2'-O-methyladenosine
  modified_base 20: mod_base = OTHER; note = 2'-fluoroadenosine
  modified_base 20^21: mod_base = OTHER; note = phosphorothioate linkage
  modified_base 21: mod_base = um
  source 1..21: mol_type = other RNA
agacaataaataccgaggaat

SEQ ID NO: 676 - RNA, 21 nt, synthetic construct
  modified_base 1: mod_base = um
  modified_base 1^2: mod_base = OTHER; note = phosphorothioate linkage
  modified_base 2: mod_base = OTHER; note = 2'-fluoroadenosine
  modified_base 2^3: mod_base = OTHER; note = phosphorothioate linkage
  modified_base 3: mod_base = cm
  modified_base 3^4: mod_base = OTHER; note = phosphorothioate linkage
  modified_base 4: mod_base = OTHER; note = 2'-fluoroadenosine
  modified_base 5: mod_base = gm
  modified_base 6: mod_base = OTHER; note = 2'-fluoroadenosine
  modified_base 7: mod_base = cm
  modified_base 8: mod_base = OTHER; note = 2'-fluoroadenosine
  modified_base 9: mod_base = OTHER; note = 2'-O-methyladenosine
  modified_base 10: mod_base = OTHER; note = 2'-fluorouridine
  modified_base 11: mod_base = OTHER; note = 2'-O-methyladenosine
  modified_base 12: mod_base = OTHER; note = 2'-fluoroadenosine
  modified_base 13: mod_base = OTHER; note = 2'-O-methyladenosine
  modified_base 14: mod_base = OTHER; note = 2'-fluorouridine
  modified_base 15: mod_base = OTHER; note = 2'-O-methyladenosine
  modified_base 16: mod_base = OTHER; note = 2'-fluorocytidine
  modified_base 17: mod_base = cm
  modified_base 18: mod_base = OTHER; note = 2'-fluoroguanosine
  modified_base 19: mod_base = OTHER; note = 2'-O-methyladenosine
  modified_base 20: mod_base = OTHER; note = 2'-fluoroguanosine
  modified_base 20^21: mod_base = OTHER; note = phosphorothioate linkage
  modified_base 21: mod_base = gm
  source 1..21: mol_type = other RNA
tacagacaataaataccgagg

SEQ ID NO: 677 - RNA, 21 nt, synthetic construct
  modified_base 1: mod_base = um
  modified_base 1^2: mod_base = OTHER; note = phosphorothioate linkage
  modified_base 2: mod_base = OTHER; note = 2'-fluoroguanosine
  modified_base 2^3: mod_base = OTHER; note = phosphorothioate linkage
  modified_base 3: mod_base = OTHER; note = 2'-O-methyladenosine
  modified_base 3^4: mod_base = OTHER; note = phosphorothioate linkage
  modified_base 4: mod_base = OTHER; note = 2'-fluorocytidine
  modified_base 5: mod_base = OTHER; note = 2'-O-methyladenosine
  modified_base 6: mod_base = OTHER; note = 2'-fluoroguanosine
  modified_base 7: mod_base = OTHER; note = 2'-O-methyladenosine
  modified_base 8: mod_base = OTHER; note = 2'-fluorocytidine
  modified_base 9: mod_base = OTHER; note = 2'-O-methyladenosine
  modified_base 10: mod_base = OTHER; note = 2'-fluoroadenosine
  modified_base 11: mod_base = um
  modified_base 12: mod_base = OTHER; note = 2'-fluoroadenosine
  modified_base 13: mod_base = OTHER; note = 2'-O-methyladenosine
  modified_base 14: mod_base = OTHER; note = 2'-fluoroadenosine
  modified_base 15: mod_base = um
  modified_base 16: mod_base = OTHER; note = 2'-fluoroadenosine
  modified_base 17: mod_base = cm
  modified_base 18: mod_base = OTHER; note = 2'-fluorocytidine
  modified_base 19: mod_base = gm
  modified_base 20: mod_base = OTHER; note = 2'-fluoroadenosine
  modified_base 20^21: mod_base = OTHER; note = phosphorothioate linkage
  modified_base 21: mod_base = gm
  source 1..21: mol_type = other RNA
tgacagacaataaataccgag

SEQ ID NO: 678 - RNA, 21 nt, synthetic construct
  modified_base 1: mod_base = um
  modified_base 1^2: mod_base = OTHER; note = phosphorothioate linkage
  modified_base 2: mod_base = OTHER; note = 2'-fluorocytidine
  modified_base 2^3: mod_base = OTHER; note = phosphorothioate linkage
  modified_base 3: mod_base = um
  modified_base 3^4: mod_base = OTHER; note = phosphorothioate linkage
  modified_base 4: mod_base = OTHER; note = 2'-fluoroadenosine
  modified_base 5: mod_base = gm
  modified_base 6: mod_base = OTHER; note = 2'-fluoroguanosine
  modified_base 7: mod_base = um
  modified_base 8: mod_base = OTHER; note = 2'-fluoroguanosine
  modified_base 9: mod_base = gm
  modified_base 10: mod_base = OTHER; note = 2'-fluoroguanosine
  modified_base 11: mod_base = gm
  modified_base 12: mod_base = OTHER; note = 2'-fluoroadenosine
  modified_base 13: mod_base = cm
  modified_base 14: mod_base = OTHER; note = 2'-fluoroadenosine
  modified_base 15: mod_base = gm
  modified_base 16: mod_base = OTHER; note = 2'-fluoroadenosine
  modified_base 17: mod_base = cm
  modified_base 18: mod_base = OTHER; note = 2'-fluoroadenosine
  modified_base 19: mod_base = OTHER; note = 2'-O-methyladenosine
  modified_base 20: mod_base = OTHER; note = 2'-fluorouridine
  modified_base 20^21: mod_base = OTHER; note = phosphorothioate linkage
  modified_base 21: mod_base = cm
  source 1..21: mol_type = other RNA
tctaggtggggacagacaatc

SEQ ID NO: 679 - RNA, 21 nt, synthetic construct
  modified_base 1: mod_base = OTHER; note = 5 -cyclopropyl phosphonate-2 -O-methyladenosine
  modified_base 1^2: mod_base = OTHER; note = phosphorothioate linkage
  modified_base 2: mod_base = OTHER; note = 2'-fluorocytidine
  modified_base 2^3: mod_base = OTHER; note = phosphorothioate linkage
  modified_base 3: mod_base = OTHER; note = 2'-O-methyladenosine
  modified_base 3^4: mod_base = OTHER; note = phosphorothioate linkage
  modified_base 4: mod_base = OTHER; note = 2'-fluoroadenosine
  modified_base 5: mod_base = um
  modified_base 6: mod_base = OTHER; note = 2'-fluoroadenosine
  modified_base 7: mod_base = OTHER; note = 2'-O-methyladenosine
  modified_base 8: mod_base = OTHER; note = 2'-fluoroadenosine
  modified_base 9: mod_base = um
  modified_base 10: mod_base = OTHER; note = 2'-fluoroadenosine
  modified_base 11: mod_base = cm
  modified_base 12: mod_base = OTHER; note = 2'-fluorocytidine
  modified_base 13: mod_base = gm
  modified_base 14: mod_base = OTHER; note = 2'-fluoroadenosine
  modified_base 15: mod_base = gm
  modified_base 16: mod_base = OTHER; note = 2'-fluoroguanosine
  modified_base 17: mod_base = OTHER; note = 2'-O-methyladenosine
  modified_base 18: mod_base = OTHER; note = 2'-fluoroadenosine
  modified_base 19: mod_base = um
  modified_base 20: mod_base = OTHER; note = 2'-fluoroguanosine
  modified_base 20^21: mod_base = OTHER; note = phosphorothioate linkage
  modified_base 21: mod_base = cm
  source 1..21: mol_type = other RNA
acaataaataccgaggaatgc

SEQ ID NO: 680 - RNA, 21 nt, synthetic construct
  modified_base 1: mod_base = OTHER; note = 5 -cyclopropyl phosphonate-2 -O-methyladenosine
  modified_base 1^2: mod_base = OTHER; note = phosphorothioate linkage
  modified_base 2: mod_base = OTHER; note = 2'-fluorocytidine
  modified_base 2^3: mod_base = OTHER; note = phosphorothioate linkage
  modified_base 3: mod_base = gm
  modified_base 3^4: mod_base = OTHER; note = phosphorothioate linkage
  modified_base 4: mod_base = OTHER; note = 2'-fluorouridine
  modified_base 5: mod_base = OTHER; note = 2'-O-methyladenosine
  modified_base 6: mod_base = OTHER; note = 2'-fluoroadenosine
  modified_base 7: mod_base = um
  modified_base 8: mod_base = OTHER; note = 2'-fluoroadenosine
  modified_base 9: mod_base = cm
  modified_base 10: mod_base = OTHER; note = 2'-fluorouridine
  modified_base 11: mod_base = cm
  modified_base 12: mod_base = OTHER; note = 2'-fluorocytidine
  modified_base 13: mod_base = OTHER; note = 2'-O-methyladenosine
  modified_base 14: mod_base = OTHER; note = 2'-fluorouridine
  modified_base 15: mod_base = gm
  modified_base 16: mod_base = OTHER; note = 2'-fluoroadenosine
  modified_base 17: mod_base = cm
  modified_base 18: mod_base = OTHER; note = 2'-fluorocytidine
  modified_base 19: mod_base = OTHER; note = 2'-O-methyladenosine
  modified_base 20: mod_base = OTHER; note = 2'-fluoroguanosine
  modified_base 20^21: mod_base = OTHER; note = phosphorothioate linkage
  modified_base 21: mod_base = gm
  source 1..21: mol_type = other RNA
acgtaatactccatgaccagg

SEQ ID NO: 681 - RNA, 21 nt, synthetic construct
  modified_base 1: mod_base = OTHER; note = 5 -cyclopropyl phosphonate-2 -O-methyluridine
  modified_base 1^2: mod_base = OTHER; note = phosphorothioate linkage
  modified_base 2: mod_base = OTHER; note = 2'-fluoroadenosine
  modified_base 2^3: mod_base = OTHER; note = phosphorothioate linkage
  modified_base 3: mod_base = gm
  modified_base 3^4: mod_base = OTHER; note = phosphorothioate linkage
  modified_base 4: mod_base = OTHER; note = 2'-O-methyladenosine
  modified_base 5: mod_base = OTHER; note = 2'-fluorocytidine
  modified_base 6: mod_base = OTHER; note = 2'-O-methyladenosine
  modified_base 7: mod_base = OTHER; note = 2'-O-methyladenosine
  modified_base 8: mod_base = um
  modified_base 9: mod_base = OTHER; note = 2'-O-methyladenosine
  modified_base 10: mod_base = OTHER; note = 2'-O-methyladenosine
  modified_base 11: mod_base = OTHER; note = 2'-O-methyladenosine
  modified_base 12: mod_base = OTHER; note = 2'-fluorouridine
  modified_base 13: mod_base = OTHER; note = 2'-O-methyladenosine
  modified_base 14: mod_base = OTHER; note = 2'-fluorocytidine
  modified_base 15: mod_base = cm
  modified_base 16: mod_base = OTHER; note = 2'-fluoroguanosine
  modified_base 17: mod_base = OTHER; note = 2'-O-methyladenosine
  modified_base 18: mod_base = gm
  modified_base 19: mod_base = gm
  modified_base 20: mod_base = OTHER; note = 2'-O-methyladenosine
  modified_base 20^21: mod_base = OTHER; note = phosphorothioate linkage
  modified_base 21: mod_base = OTHER; note = 2'-O-methyladenosine
  source 1..21: mol_type = other RNA
tagacaataaataccgaggaa

SEQ ID NO: 682 - RNA, 21 nt, synthetic construct
  modified_base 1: mod_base = OTHER; note = 5 -cyclopropyl phosphonate-2 -O-methyluridine
  modified_base 1^2: mod_base = OTHER; note = phosphorothioate linkage
  modified_base 2: mod_base = OTHER; note = 2'-fluoroadenosine
  modified_base 2^3: mod_base = OTHER; note = phosphorothioate linkage
  modified_base 3: mod_base = gm
  modified_base 3^4: mod_base = OTHER; note = phosphorothioate linkage
  modified_base 4: mod_base = OTHER; note = 2'-O-methyladenosine
  modified_base 5: mod_base = cm
  modified_base 6: mod_base = OTHER; note = 2'-fluoroadenosine
  modified_base 7: mod_base = OTHER; note = 2'-O-methyladenosine
  modified_base 8: mod_base = um
  modified_base 9: mod_base = OTHER; note = 2'-O-methyladenosine
  modified_base 10: mod_base = OTHER; note = 2'-O-methyladenosine
  modified_base 11: mod_base = OTHER; note = 2'-O-methyladenosine
  modified_base 12: mod_base = OTHER; note = 2'-fluorouridine
  modified_base 13: mod_base = OTHER; note = 2'-O-methyladenosine
  modified_base 14: mod_base = OTHER; note = 2'-fluorocytidine
  modified_base 15: mod_base = cm
  modified_base 16: mod_base = OTHER; note = 2'-fluoroguanosine
  modified_base 17: mod_base = OTHER; note = 2'-O-methyladenosine
  modified_base 18: mod_base = gm
  modified_base 19: mod_base = gm
  modified_base 20: mod_base = OTHER; note = 2'-O-methyladenosine
  modified_base 20^21: mod_base = OTHER; note = phosphorothioate linkage
  modified_base 21: mod_base = OTHER; note = 2'-O-methyladenosine
  source 1..21: mol_type = other RNA
tagacaataaataccgaggaa

SEQ ID NO: 683 - RNA, 21 nt, synthetic construct
  modified_base 1: mod_base = OTHER; note = 5 -cyclopropyl phosphonate-2 -O-methyluridine
  modified_base 1^2: mod_base = OTHER; note = phosphorothioate linkage
  modified_base 2: mod_base = OTHER; note = 2'-fluoroadenosine
  modified_base 2^3: mod_base = OTHER; note = phosphorothioate linkage
  modified_base 3: mod_base = gm
  modified_base 3^4: mod_base = OTHER; note = phosphorothioate linkage
  modified_base 4: mod_base = OTHER; note = 2'-O-methyladenosine
  modified_base 5: mod_base = cm
  modified_base 6: mod_base = OTHER; note = 2'-O-methyladenosine
  modified_base 7: mod_base = OTHER; note = 2'-O-methyladenosine
  modified_base 8: mod_base = OTHER; note = 2'-fluorouridine
  modified_base 9: mod_base = OTHER; note = 2'-O-methyladenosine
  modified_base 10: mod_base = OTHER; note = 2'-O-methyladenosine
  modified_base 11: mod_base = OTHER; note = 2'-O-methyladenosine
  modified_base 12: mod_base = OTHER; note = 2'-fluorouridine
  modified_base 13: mod_base = OTHER; note = 2'-O-methyladenosine
  modified_base 14: mod_base = OTHER; note = 2'-fluorocytidine
  modified_base 15: mod_base = cm
  modified_base 16: mod_base = OTHER; note = 2'-fluoroguanosine
  modified_base 17: mod_base = OTHER; note = 2'-O-methyladenosine
  modified_base 18: mod_base = gm
  modified_base 19: mod_base = gm
  modified_base 20: mod_base = OTHER; note = 2'-O-methyladenosine
  modified_base 20^21: mod_base = OTHER; note = phosphorothioate linkage
  modified_base 21: mod_base = OTHER; note = 2'-O-methyladenosine
  source 1..21: mol_type = other RNA
tagacaataaataccgaggaa

SEQ ID NO: 684 - RNA, 21 nt, synthetic construct
  modified_base 1: mod_base = OTHER; note = 5 -cyclopropyl phosphonate-2 -O-methyluridine
  modified_base 1^2: mod_base = OTHER; note = phosphorothioate linkage
  modified_base 2: mod_base = OTHER; note = 2'-fluoroadenosine
  modified_base 2^3: mod_base = OTHER; note = phosphorothioate linkage
  modified_base 3: mod_base = gm
  modified_base 3^4: mod_base = OTHER; note = phosphorothioate linkage
  modified_base 4: mod_base = OTHER; note = 2'-O-methyladenosine
  modified_base 5: mod_base = cm
  modified_base 6: mod_base = OTHER; note = 2'-O-methyladenosine
  modified_base 7: mod_base = OTHER; note = 2'-O-methyladenosine
  modified_base 8: mod_base = um
  modified_base 9: mod_base = OTHER; note = 2'-fluoroadenosine
  modified_base 10: mod_base = OTHER; note = 2'-O-methyladenosine
  modified_base 11: mod_base = OTHER; note = 2'-O-methyladenosine
  modified_base 12: mod_base = OTHER; note = 2'-fluorouridine
  modified_base 13: mod_base = OTHER; note = 2'-O-methyladenosine
  modified_base 14: mod_base = OTHER; note = 2'-fluorocytidine
  modified_base 15: mod_base = cm
  modified_base 16: mod_base = OTHER; note = 2'-fluoroguanosine
  modified_base 17: mod_base = OTHER; note = 2'-O-methyladenosine
  modified_base 18: mod_base = gm
  modified_base 19: mod_base = gm
  modified_base 20: mod_base = OTHER; note = 2'-O-methyladenosine
  modified_base 20^21: mod_base = OTHER; note = phosphorothioate linkage
  modified_base 21: mod_base = OTHER; note = 2'-O-methyladenosine
  source 1..21: mol_type = other RNA
tagacaataaataccgaggaa

SEQ ID NO: 685 - RNA, 21 nt, synthetic construct
  modified_base 1: mod_base = OTHER; note = 5 -cyclopropyl phosphonate-2 -O-methyluridine
  modified_base 1^2: mod_base = OTHER; note = phosphorothioate linkage
  modified_base 2: mod_base = OTHER; note = 2'-fluoroadenosine
  modified_base 2^3: mod_base = OTHER; note = phosphorothioate linkage
  modified_base 3: mod_base = gm
  modified_base 3^4: mod_base = OTHER; note = phosphorothioate linkage
  modified_base 4: mod_base = OTHER; note = 2'-O-methyladenosine
  modified_base 5: mod_base = OTHER; note = 2'-fluorocytidine
  modified_base 6: mod_base = OTHER; note = 2'-O-methyladenosine
  modified_base 7: mod_base = OTHER; note = 2'-O-methyladenosine
  modified_base 8: mod_base = um
  modified_base 9: mod_base = OTHER; note = 2'-O-methyladenosine
  modified_base 10: mod_base = OTHER; note = 2'-O-methyladenosine
  modified_base 11: mod_base = OTHER; note = 2'-O-methyladenosine
  modified_base 12: mod_base = OTHER; note = 2'-fluorouridine
  modified_base 13: mod_base = OTHER; note = 2'-O-methyladenosine
  modified_base 14: mod_base = OTHER; note = 2'-fluorocytidine
  modified_base 15: mod_base = cm
  modified_base 16: mod_base = OTHER; note = 2'-fluoroguanosine
  modified_base 17: mod_base = OTHER; note = 2'-O-methyladenosine
  modified_base 18: mod_base = gm
  modified_base 19: mod_base = gm
  modified_base 20: mod_base = OTHER; note = 2'-O-methyladenosine
  modified_base 20^21: mod_base = OTHER; note = phosphorothioate linkage
  modified_base 21: mod_base = cm
  source 1..21: mol_type = other RNA
tagacaataaataccgaggac

SEQ ID NO: 686 - RNA, 21 nt, synthetic construct
  modified_base 1: mod_base = OTHER; note = 5 -cyclopropyl phosphonate-2 -O-methyladenosine
  modified_base 1^2: mod_base = OTHER; note = phosphorothioate linkage
  modified_base 2: mod_base = OTHER; note = 2'-fluorocytidine
  modified_base 2^3: mod_base = OTHER; note = phosphorothioate linkage
  modified_base 3: mod_base = gm
  modified_base 3^4: mod_base = OTHER; note = phosphorothioate linkage
  modified_base 4: mod_base = OTHER; note = 2'-fluorouridine
  modified_base 5: mod_base = OTHER; note = 2'-O-methyladenosine
  modified_base 6: mod_base = OTHER; note = 2'-O-methyladenosine
  modified_base 7: mod_base = um
  modified_base 8: mod_base = OTHER; note = 2'-O-methyladenosine
  modified_base 9: mod_base = cm
  modified_base 10: mod_base = um
  modified_base 11: mod_base = cm
  modified_base 12: mod_base = OTHER; note = 2'-fluorocytidine
  modified_base 13: mod_base = OTHER; note = 2'-O-methyladenosine
  modified_base 14: mod_base = OTHER; note = 2'-fluorouridine
  modified_base 15: mod_base = gm
  modified_base 16: mod_base = OTHER; note = 2'-fluoroadenosine
  modified_base 17: mod_base = cm
  modified_base 18: mod_base = cm
  modified_base 19: mod_base = OTHER; note = 2'-O-methyladenosine
  modified_base 20: mod_base = gm
  modified_base 20^21: mod_base = OTHER; note = phosphorothioate linkage
  modified_base 21: mod_base = gm
  source 1..21: mol_type = other RNA
acgtaatactccatgaccagg

SEQ ID NO: 687 - RNA, 21 nt, synthetic construct
  modified_base 1: mod_base = OTHER; note = 5 -cyclopropyl phosphonate-2 -O-methyladenosine
  modified_base 1^2: mod_base = OTHER; note = phosphorothioate linkage
  modified_base 2: mod_base = OTHER; note = 2'-fluorocytidine
  modified_base 2^3: mod_base = OTHER; note = phosphorothioate linkage
  modified_base 3: mod_base = OTHER; note = 2'-fluoroguanosine
  modified_base 3^4: mod_base = OTHER; note = phosphorothioate linkage
  modified_base 4: mod_base = um
  modified_base 5: mod_base = OTHER; note = 2'-O-methyladenosine
  modified_base 6: mod_base = OTHER; note = 2'-O-methyladenosine
  modified_base 7: mod_base = um
  modified_base 8: mod_base = OTHER; note = 2'-O-methyladenosine
  modified_base 9: mod_base = cm
  modified_base 10: mod_base = um
  modified_base 11: mod_base = cm
  modified_base 12: mod_base = OTHER; note = 2'-fluorocytidine
  modified_base 13: mod_base = OTHER; note = 2'-O-methyladenosine
  modified_base 14: mod_base = OTHER; note = 2'-fluorouridine
  modified_base 15: mod_base = gm
  modified_base 16: mod_base = OTHER; note = 2'-fluoroadenosine
  modified_base 17: mod_base = cm
  modified_base 18: mod_base = cm
  modified_base 19: mod_base = OTHER; note = 2'-O-methyladenosine
  modified_base 20: mod_base = gm
  modified_base 20^21: mod_base = OTHER; note = phosphorothioate linkage
  modified_base 21: mod_base = gm
  source 1..21: mol_type = other RNA
acgtaatactccatgaccagg

SEQ ID NO: 688 - RNA, 21 nt, synthetic construct
  modified_base 1: mod_base = OTHER; note = 5 -cyclopropyl phosphonate-2 -O-methyladenosine
  modified_base 1^2: mod_base = OTHER; note = phosphorothioate linkage
  modified_base 2: mod_base = OTHER; note = 2'-fluorocytidine
  modified_base 2^3: mod_base = OTHER; note = phosphorothioate linkage
  modified_base 3: mod_base = gm
  modified_base 3^4: mod_base = OTHER; note = phosphorothioate linkage
  modified_base 4: mod_base = um
  modified_base 5: mod_base = OTHER; note = 2'-fluoroadenosine
  modified_base 6: mod_base = OTHER; note = 2'-O-methyladenosine
  modified_base 7: mod_base = um
  modified_base 8: mod_base = OTHER; note = 2'-O-methyladenosine
  modified_base 9: mod_base = cm
  modified_base 10: mod_base = um
  modified_base 11: mod_base = cm
  modified_base 12: mod_base = OTHER; note = 2'-fluorocytidine
  modified_base 13: mod_base = OTHER; note = 2'-O-methyladenosine
  modified_base 14: mod_base = OTHER; note = 2'-fluorouridine
  modified_base 15: mod_base = gm
  modified_base 16: mod_base = OTHER; note = 2'-fluoroadenosine
  modified_base 17: mod_base = cm
  modified_base 18: mod_base = cm
  modified_base 19: mod_base = OTHER; note = 2'-O-methyladenosine
  modified_base 20: mod_base = gm
  modified_base 20^21: mod_base = OTHER; note = phosphorothioate linkage
  modified_base 21: mod_base = gm
  source 1..21: mol_type = other RNA
acgtaatactccatgaccagg

SEQ ID NO: 689 - RNA, 21 nt, synthetic construct
  modified_base 1: mod_base = OTHER; note = 5 -cyclopropyl phosphonate-2 -O-methyladenosine
  modified_base 1^2: mod_base = OTHER; note = phosphorothioate linkage
  modified_base 2: mod_base = OTHER; note = 2'-fluorocytidine
  modified_base 2^3: mod_base = OTHER; note = phosphorothioate linkage
  modified_base 3: mod_base = gm
  modified_base 3^4: mod_base = OTHER; note = phosphorothioate linkage
  modified_base 4: mod_base = um
  modified_base 5: mod_base = OTHER; note = 2'-O-methyladenosine
  modified_base 6: mod_base = OTHER; note = 2'-fluoroadenosine
  modified_base 7: mod_base = um
  modified_base 8: mod_base = OTHER; note = 2'-O-methyladenosine
  modified_base 9: mod_base = cm
  modified_base 10: mod_base = um
  modified_base 11: mod_base = cm
  modified_base 12: mod_base = OTHER; note = 2'-fluorocytidine
  modified_base 13: mod_base = OTHER; note = 2'-O-methyladenosine
  modified_base 14: mod_base = OTHER; note = 2'-fluorouridine
  modified_base 15: mod_base = gm
  modified_base 16: mod_base = OTHER; note = 2'-fluoroadenosine
  modified_base 17: mod_base = cm
  modified_base 18: mod_base = cm
  modified_base 19: mod_base = OTHER; note = 2'-O-methyladenosine
  modified_base 20: mod_base = gm
  modified_base 20^21: mod_base = OTHER; note = phosphorothioate linkage
  modified_base 21: mod_base = gm
  source 1..21: mol_type = other RNA
acgtaatactccatgaccagg

SEQ ID NO: 690 - RNA, 21 nt, synthetic construct
  modified_base 1: mod_base = um
  modified_base 1^2: mod_base = OTHER; note = phosphorothioate linkage
  modified_base 2: mod_base = OTHER; note = 2'-fluorouridine
  modified_base 2^3: mod_base = OTHER; note = phosphorothioate linkage
  modified_base 3: mod_base = OTHER; note = 2'-fluoroguanosine
  modified_base 3^4: mod_base = OTHER; note = phosphorothioate linkage
  modified_base 4: mod_base = um
  modified_base 5: mod_base = OTHER; note = 2'-O-methyladenosine
  modified_base 6: mod_base = gm
  modified_base 7: mod_base = um
  modified_base 8: mod_base = gm
  modified_base 9: mod_base = gm
  modified_base 10: mod_base = OTHER; note = 2'-O-methyladenosine
  modified_base 11: mod_base = cm
  modified_base 12: mod_base = OTHER; note = 2'-fluoroguanosine
  modified_base 13: mod_base = OTHER; note = 2'-O-methyladenosine
  modified_base 14: mod_base = OTHER; note = 2'-fluorouridine
  modified_base 15: mod_base = cm
  modified_base 16: mod_base = OTHER; note = 2'-fluorouridine
  modified_base 17: mod_base = um
  modified_base 18: mod_base = gm
  modified_base 19: mod_base = cm
  modified_base 20: mod_base = cm
  modified_base 20^21: mod_base = OTHER; note = phosphorothioate linkage
  modified_base 21: mod_base = OTHER; note = 2'-O-methyladenosine
  source 1..21: mol_type = other RNA
ttgtagtggacgatcttgcca

SEQ ID NO: 691 - RNA, 21 nt, synthetic construct
  modified_base 1: mod_base = um
  modified_base 1^2: mod_base = OTHER; note = phosphorothioate linkage
  modified_base 2: mod_base = OTHER; note = 2'-fluorouridine
  modified_base 2^3: mod_base = OTHER; note = phosphorothioate linkage
  modified_base 3: mod_base = gm
  modified_base 3^4: mod_base = OTHER; note = phosphorothioate linkage
  modified_base 4: mod_base = OTHER; note = 2'-fluorouridine
  modified_base 5: mod_base = OTHER; note = 2'-O-methyladenosine
  modified_base 6: mod_base = gm
  modified_base 7: mod_base = um
  modified_base 8: mod_base = gm
  modified_base 9: mod_base = gm
  modified_base 10: mod_base = OTHER; note = 2'-O-methyladenosine
  modified_base 11: mod_base = cm
  modified_base 12: mod_base = OTHER; note = 2'-fluoroguanosine
  modified_base 13: mod_base = OTHER; note = 2'-O-methyladenosine
  modified_base 14: mod_base = OTHER; note = 2'-fluorouridine
  modified_base 15: mod_base = cm
  modified_base 16: mod_base = OTHER; note = 2'-fluorouridine
  modified_base 17: mod_base = um
  modified_base 18: mod_base = gm
  modified_base 19: mod_base = cm
  modified_base 20: mod_base = cm
  modified_base 20^21: mod_base = OTHER; note = phosphorothioate linkage
  modified_base 21: mod_base = OTHER; note = 2'-O-methyladenosine
  source 1..21: mol_type = other RNA
ttgtagtggacgatcttgcca

SEQ ID NO: 692 - RNA, 21 nt, synthetic construct
  modified_base 1: mod_base = um
  modified_base 1^2: mod_base = OTHER; note = phosphorothioate linkage
  modified_base 2: mod_base = OTHER; note = 2'-fluorouridine
  modified_base 2^3: mod_base = OTHER; note = phosphorothioate linkage
  modified_base 3: mod_base = gm
  modified_base 3^4: mod_base = OTHER; note = phosphorothioate linkage
  modified_base 4: mod_base = um
  modified_base 5: mod_base = OTHER; note = 2'-fluoroadenosine
  modified_base 6: mod_base = gm
  modified_base 7: mod_base = um
  modified_base 8: mod_base = gm
  modified_base 9: mod_base = gm
  modified_base 10: mod_base = OTHER; note = 2'-O-methyladenosine
  modified_base 11: mod_base = cm
  modified_base 12: mod_base = OTHER; note = 2'-fluoroguanosine
  modified_base 13: mod_base = OTHER; note = 2'-O-methyladenosine
  modified_base 14: mod_base = OTHER; note = 2'-fluorouridine
  modified_base 15: mod_base = cm
  modified_base 16: mod_base = OTHER; note = 2'-fluorouridine
  modified_base 17: mod_base = um
  modified_base 18: mod_base = gm
  modified_base 19: mod_base = cm
  modified_base 20: mod_base = cm
  modified_base 20^21: mod_base = OTHER; note = phosphorothioate linkage
  modified_base 21: mod_base = OTHER; note = 2'-O-methyladenosine
  source 1..21: mol_type = other RNA
ttgtagtggacgatcttgcca

SEQ ID NO: 693 - RNA, 21 nt, synthetic construct
  modified_base 1: mod_base = OTHER; note = 5 -cyclopropyl phosphonate-2 -O-methyluridine
  modified_base 1^2: mod_base = OTHER; note = phosphorothioate linkage
  modified_base 2: mod_base = OTHER; note = 2'-fluorouridine
  modified_base 2^3: mod_base = OTHER; note = phosphorothioate linkage
  modified_base 3: mod_base = gm
  modified_base 3^4: mod_base = OTHER; note = phosphorothioate linkage
  modified_base 4: mod_base = OTHER; note = 2'-fluorouridine
  modified_base 5: mod_base = OTHER; note = 2'-O-methyladenosine
  modified_base 6: mod_base = OTHER; note = 2'-fluoroguanosine
  modified_base 7: mod_base = um
  modified_base 8: mod_base = OTHER; note = 2'-fluoroguanosine
  modified_base 9: mod_base = gm
  modified_base 10: mod_base = OTHER; note = 2'-fluoroadenosine
  modified_base 11: mod_base = cm
  modified_base 12: mod_base = OTHER; note = 2'-fluoroguanosine
  modified_base 13: mod_base = OTHER; note = 2'-O-methyladenosine
  modified_base 14: mod_base = OTHER; note = 2'-fluorouridine
  modified_base 15: mod_base = cm
  modified_base 16: mod_base = OTHER; note = 2'-fluorouridine
  modified_base 17: mod_base = um
  modified_base 18: mod_base = OTHER; note = 2'-fluoroguanosine
  modified_base 19: mod_base = cm
  modified_base 20: mod_base = OTHER; note = 2'-fluorocytidine
  modified_base 20^21: mod_base = OTHER; note = phosphorothioate linkage
  modified_base 21: mod_base = OTHER; note = 2'-O-methyladenosine
  source 1..21: mol_type = other RNA
ttgtagtggacgatcttgcca

SEQ ID NO: 694 - RNA, 21 nt, synthetic construct
  modified_base 1: mod_base = um
  modified_base 1^2: mod_base = OTHER; note = phosphorothioate linkage
  modified_base 2: mod_base = OTHER; note = 2'-fluorouridine
  modified_base 2^3: mod_base = OTHER; note = phosphorothioate linkage
  modified_base 3: mod_base = gm
  modified_base 4: mod_base = OTHER; note = 2'-fluorouridine
  modified_base 5: mod_base = OTHER; note = 2'-O-methyladenosine
  modified_base 6: mod_base = OTHER; note = 2'-fluoroguanosine
  modified_base 7: mod_base = um
  modified_base 8: mod_base = OTHER; note = 2'-fluoroguanosine
  modified_base 9: mod_base = gm
  modified_base 10: mod_base = OTHER; note = 2'-fluoroadenosine
  modified_base 11: mod_base = cm
  modified_base 12: mod_base = OTHER; note = 2'-fluoroguanosine
  modified_base 13: mod_base = OTHER; note = 2'-O-methyladenosine
  modified_base 14: mod_base = OTHER; note = 2'-fluorouridine
  modified_base 15: mod_base = cm
  modified_base 16: mod_base = OTHER; note = 2'-fluorouridine
  modified_base 17: mod_base = um
  modified_base 18: mod_base = OTHER; note = 2'-fluoroguanosine
  modified_base 19: mod_base = cm
  modified_base 19^20: mod_base = OTHER; note = phosphorothioate linkage
  modified_base 20: mod_base = OTHER; note = 2'-fluorocytidine
  modified_base 20^21: mod_base = OTHER; note = phosphorothioate linkage
  modified_base 21: mod_base = OTHER; note = 2'-O-methyladenosine
  source 1..21: mol_type = other RNA
ttgtagtggacgatcttgcca

SEQ ID NO: 695 - RNA, 21 nt, synthetic construct
  modified_base 1: mod_base = OTHER; note = 5 -cyclopropyl phosphonate-2 -O-methyluridine
  modified_base 1^2: mod_base = OTHER; note = phosphorothioate linkage
  modified_base 2: mod_base = OTHER; note = 2'-fluoroadenosine
  modified_base 2^3: mod_base = OTHER; note = phosphorothioate linkage
  modified_base 3: mod_base = gm
  modified_base 3^4: mod_base = OTHER; note = phosphorothioate linkage
  modified_base 4: mod_base = OTHER; note = 2'-fluoroadenosine
  modified_base 5: mod_base = cm
  modified_base 6: mod_base = OTHER; note = 2'-fluoroadenosine
  modified_base 7: mod_base = OTHER; note = 2'-O-methyladenosine
  modified_base 8: mod_base = OTHER; note = 2'-fluorouridine
  modified_base 9: mod_base = OTHER; note = 2'-O-methyladenosine
  modified_base 10: mod_base = OTHER; note = 2'-fluoroadenosine
  modified_base 11: mod_base = OTHER; note = 2'-O-methyladenosine
  modified_base 12: mod_base = OTHER; note = 2'-fluorouridine
  modified_base 13: mod_base = OTHER; note = 2'-O-methyladenosine
  modified_base 14: mod_base = OTHER; note = 2'-fluorocytidine
  modified_base 15: mod_base = cm
  modified_base 16: mod_base = OTHER; note = 2'-fluoroguanosine
  modified_base 17: mod_base = OTHER; note = 2'-O-methyladenosine
  modified_base 18: mod_base = OTHER; note = 2'-fluoroguanosine
  modified_base 19: mod_base = gm
  modified_base 20: mod_base = OTHER; note = 2'-fluoroadenosine
  modified_base 20^21: mod_base = OTHER; note = phosphorothioate linkage
  modified_base 21: mod_base = cm
  source 1..21: mol_type = other RNA
tagacaataaataccgaggac

SEQ ID NO: 696 - RNA, 21 nt, synthetic construct
  modified_base 1: mod_base = OTHER; note = 5 -cyclopropyl phosphonate-2 -O-methyluridine
  modified_base 1^2: mod_base = OTHER; note = phosphorothioate linkage
  modified_base 2: mod_base = OTHER; note = 2'-fluoroadenosine
  modified_base 2^3: mod_base = OTHER; note = phosphorothioate linkage
  modified_base 3: mod_base = gm
  modified_base 4: mod_base = OTHER; note = 2'-fluoroadenosine
  modified_base 5: mod_base = cm
  modified_base 6: mod_base = OTHER; note = 2'-fluoroadenosine
  modified_base 7: mod_base = OTHER; note = 2'-O-methyladenosine
  modified_base 8: mod_base = OTHER; note = 2'-fluorouridine
  modified_base 9: mod_base = OTHER; note = 2'-O-methyladenosine
  modified_base 10: mod_base = OTHER; note = 2'-fluoroadenosine
  modified_base 11: mod_base = OTHER; note = 2'-O-methyladenosine
  modified_base 12: mod_base = OTHER; note = 2'-fluorouridine
  modified_base 13: mod_base = OTHER; note = 2'-O-methyladenosine
  modified_base 14: mod_base = OTHER; note = 2'-fluorocytidine
  modified_base 15: mod_base = cm
  modified_base 16: mod_base = OTHER; note = 2'-fluoroguanosine
  modified_base 17: mod_base = OTHER; note = 2'-O-methyladenosine
  modified_base 18: mod_base = OTHER; note = 2'-fluoroguanosine
  modified_base 19: mod_base = gm
  modified_base 19^20: mod_base = OTHER; note = phosphorothioate linkage
  modified_base 20: mod_base = OTHER; note = 2'-fluoroadenosine
  modified_base 20^21: mod_base = OTHER; note = phosphorothioate linkage
  modified_base 21: mod_base = OTHER; note = 2'-O-methyladenosine
  source 1..21: mol_type = other RNA
tagacaataaataccgaggaa

SEQ ID NO: 697 - RNA, 21 nt, synthetic construct
  modified_base 1: mod_base = OTHER; note = 5 -cyclopropyl phosphonate-2 -O-methyluridine
  modified_base 1^2: mod_base = OTHER; note = phosphorothioate linkage
  modified_base 2: mod_base = OTHER; note = 2'-fluoroadenosine
  modified_base 2^3: mod_base = OTHER; note = phosphorothioate linkage
  modified_base 3: mod_base = gm
  modified_base 4: mod_base = OTHER; note = 2'-fluoroadenosine
  modified_base 5: mod_base = cm
  modified_base 6: mod_base = OTHER; note = 2'-fluoroadenosine
  modified_base 7: mod_base = OTHER; note = 2'-O-methyladenosine
  modified_base 8: mod_base = OTHER; note = 2'-fluorouridine
  modified_base 9: mod_base = OTHER; note = 2'-O-methyladenosine
  modified_base 10: mod_base = OTHER; note = 2'-fluoroadenosine
  modified_base 11: mod_base = OTHER; note = 2'-O-methyladenosine
  modified_base 12: mod_base = OTHER; note = 2'-fluorouridine
  modified_base 13: mod_base = OTHER; note = 2'-O-methyladenosine
  modified_base 14: mod_base = OTHER; note = 2'-fluorocytidine
  modified_base 15: mod_base = cm
  modified_base 16: mod_base = OTHER; note = 2'-fluoroguanosine
  modified_base 17: mod_base = OTHER; note = 2'-O-methyladenosine
  modified_base 18: mod_base = OTHER; note = 2'-fluoroguanosine
  modified_base 19: mod_base = gm
  modified_base 20: mod_base = OTHER; note = 2'-fluoroadenosine
  modified_base 20^21: mod_base = OTHER; note = phosphorothioate linkage
  modified_base 21: mod_base = OTHER; note = 2'-O-methyladenosine
  source 1..21: mol_type = other RNA
tagacaataaataccgaggaa

SEQ ID NO: 698 - RNA, 21 nt, synthetic construct
  modified_base 1: mod_base = OTHER; note = 5 -cyclopropyl phosphonate-2 -O-methyluridine
  modified_base 1^2: mod_base = OTHER; note = phosphorothioate linkage
  modified_base 2: mod_base = OTHER; note = 2'-fluoroadenosine
  modified_base 2^3: mod_base = OTHER; note = phosphorothioate linkage
  modified_base 3: mod_base = gm
  modified_base 3^4: mod_base = OTHER; note = phosphorothioate linkage
  modified_base 4: mod_base = OTHER; note = 2'-O-methyladenosine
  modified_base 5: mod_base = cm
  modified_base 6: mod_base = OTHER; note = 2'-O-methyladenosine
  modified_base 7: mod_base = OTHER; note = 2'-fluoroadenosine
  modified_base 8: mod_base = um
  modified_base 9: mod_base = OTHER; note = 2'-O-methyladenosine
  modified_base 10: mod_base = OTHER; note = 2'-O-methyladenosine
  modified_base 11: mod_base = OTHER; note = 2'-O-methyladenosine
  modified_base 12: mod_base = OTHER; note = 2'-fluorouridine
  modified_base 13: mod_base = OTHER; note = 2'-O-methyladenosine
  modified_base 14: mod_base = OTHER; note = 2'-fluorocytidine
  modified_base 15: mod_base = cm
  modified_base 16: mod_base = OTHER; note = 2'-fluoroguanosine
  modified_base 17: mod_base = OTHER; note = 2'-O-methyladenosine
  modified_base 18: mod_base = gm
  modified_base 19: mod_base = gm
  modified_base 20: mod_base = OTHER; note = 2'-O-methyladenosine
  modified_base 20^21: mod_base = OTHER; note = phosphorothioate linkage
  modified_base 21: mod_base = OTHER; note = 2'-O-methyladenosine
  source 1..21: mol_type = other RNA
tagacaataaataccgaggaa

SEQ ID NO: 699 - RNA, 21 nt, synthetic construct
  modified_base 1: mod_base = OTHER; note = 5 -cyclopropyl phosphonate-2 -O-methyluridine
  modified_base 1^2: mod_base = OTHER; note = phosphorothioate linkage
  modified_base 2: mod_base = OTHER; note = 2'-fluoroadenosine
  modified_base 2^3: mod_base = OTHER; note = phosphorothioate linkage
  modified_base 3: mod_base = gm
  modified_base 3^4: mod_base = OTHER; note = phosphorothioate linkage
  modified_base 4: mod_base = OTHER; note = 2'-O-methyladenosine
  modified_base 5: mod_base = cm
  modified_base 6: mod_base = OTHER; note = 2'-O-methyladenosine
  modified_base 7: mod_base = OTHER; note = 2'-O-methyladenosine
  modified_base 8: mod_base = um
  modified_base 9: mod_base = OTHER; note = 2'-O-methyladenosine
  modified_base 10: mod_base = OTHER; note = 2'-fluoroadenosine
  modified_base 11: mod_base = OTHER; note = 2'-O-methyladenosine
  modified_base 12: mod_base = OTHER; note = 2'-fluorouridine
  modified_base 13: mod_base = OTHER; note = 2'-O-methyladenosine
  modified_base 14: mod_base = OTHER; note = 2'-fluorocytidine
  modified_base 15: mod_base = cm
  modified_base 16: mod_base = OTHER; note = 2'-fluoroguanosine
  modified_base 17: mod_base = OTHER; note = 2'-O-methyladenosine
  modified_base 18: mod_base = gm
  modified_base 19: mod_base = gm
  modified_base 20: mod_base = OTHER; note = 2'-O-methyladenosine
  modified_base 20^21: mod_base = OTHER; note = phosphorothioate linkage
  modified_base 21: mod_base = OTHER; note = 2'-O-methyladenosine
  source 1..21: mol_type = other RNA
tagacaataaataccgaggaa

SEQ ID NO: 700 - RNA, 21 nt, synthetic construct
  modified_base 1: mod_base = OTHER; note = 5 -cyclopropyl phosphonate-2 -O-methyluridine
  modified_base 1^2: mod_base = OTHER; note = phosphorothioate linkage
  modified_base 2: mod_base = OTHER; note = 2'-fluoroadenosine
  modified_base 2^3: mod_base = OTHER; note = phosphorothioate linkage
  modified_base 3: mod_base = gm
  modified_base 3^4: mod_base = OTHER; note = phosphorothioate linkage
  modified_base 4: mod_base = OTHER; note = 2'-O-methyladenosine
  modified_base 5: mod_base = cm
  modified_base 6: mod_base = OTHER; note = 2'-O-methyladenosine
  modified_base 7: mod_base = OTHER; note = 2'-fluoroadenosine
  modified_base 8: mod_base = um
  modified_base 9: mod_base = OTHER; note = 2'-fluoroadenosine
  modified_base 10: mod_base = OTHER; note = 2'-fluoroadenosine
  modified_base 11: mod_base = OTHER; note = 2'-O-methyladenosine
  modified_base 12: mod_base = OTHER; note = 2'-fluorouridine
  modified_base 13: mod_base = OTHER; note = 2'-O-methyladenosine
  modified_base 14: mod_base = OTHER; note = 2'-fluorocytidine
  modified_base 15: mod_base = cm
  modified_base 16: mod_base = OTHER; note = 2'-fluoroguanosine
  modified_base 17: mod_base = OTHER; note = 2'-O-methyladenosine
  modified_base 18: mod_base = gm
  modified_base 19: mod_base = gm
  modified_base 20: mod_base = OTHER; note = 2'-O-methyladenosine
  modified_base 20^21: mod_base = OTHER; note = phosphorothioate linkage
  modified_base 21: mod_base = OTHER; note = 2'-O-methyladenosine
  source 1..21: mol_type = other RNA
tagacaataaataccgaggaa

SEQ ID NO: 701 - RNA, 21 nt, synthetic construct
  modified_base 1: mod_base = um
  modified_base 1^2: mod_base = OTHER; note = phosphorothioate linkage
  modified_base 2: mod_base = OTHER; note = 2'-fluorocytidine
  modified_base 2^3: mod_base = OTHER; note = phosphorothioate linkage
  modified_base 3: mod_base = um
  modified_base 3^4: mod_base = OTHER; note = phosphorothioate linkage
  modified_base 4: mod_base = OTHER; note = 2'-fluorouridine
  modified_base 5: mod_base = cm
  modified_base 6: mod_base = OTHER; note = 2'-fluoroadenosine
  modified_base 7: mod_base = gm
  modified_base 8: mod_base = OTHER; note = 2'-fluorocytidine
  modified_base 9: mod_base = OTHER; note = 2'-O-methyladenosine
  modified_base 10: mod_base = OTHER; note = 2'-fluorouridine
  modified_base 11: mod_base = gm
  modified_base 12: mod_base = OTHER; note = 2'-fluorouridine
  modified_base 13: mod_base = cm
  modified_base 14: mod_base = OTHER; note = 2'-fluorocytidine
  modified_base 15: mod_base = cm
  modified_base 16: mod_base = OTHER; note = 2'-fluoroadenosine
  modified_base 17: mod_base = cm
  modified_base 18: mod_base = OTHER; note = 2'-fluorouridine
  modified_base 19: mod_base = um
  modified_base 20: mod_base = OTHER; note = 2'-fluoroguanosine
  modified_base 20^21: mod_base = OTHER; note = phosphorothioate linkage
  modified_base 21: mod_base = um
  source 1..21: mol_type = other RNA
tcttcagcatgtcccacttgt

SEQ ID NO: 702 - RNA, 21 nt, synthetic construct
  modified_base 1: mod_base = um
  modified_base 1^2: mod_base = OTHER; note = phosphorothioate linkage
  modified_base 2: mod_base = OTHER; note = 2'-fluorouridine
  modified_base 2^3: mod_base = OTHER; note = phosphorothioate linkage
  modified_base 3: mod_base = cm
  modified_base 3^4: mod_base = OTHER; note = phosphorothioate linkage
  modified_base 4: mod_base = OTHER; note = 2'-fluorouridine
  modified_base 5: mod_base = um
  modified_base 6: mod_base = OTHER; note = 2'-fluorocytidine
  modified_base 7: mod_base = OTHER; note = 2'-O-methyladenosine
  modified_base 8: mod_base = OTHER; note = 2'-fluoroguanosine
  modified_base 9: mod_base = cm
  modified_base 10: mod_base = OTHER; note = 2'-fluoroadenosine
  modified_base 11: mod_base = um
  modified_base 12: mod_base = OTHER; note = 2'-fluoroguanosine
  modified_base 13: mod_base = um
  modified_base 14: mod_base = OTHER; note = 2'-fluorocytidine
  modified_base 15: mod_base = cm
  modified_base 16: mod_base = OTHER; note = 2'-fluorocytidine
  modified_base 17: mod_base = OTHER; note = 2'-O-methyladenosine
  modified_base 18: mod_base = OTHER; note = 2'-fluorocytidine
  modified_base 19: mod_base = um
  modified_base 20: mod_base = OTHER; note = 2'-fluorouridine
  modified_base 20^21: mod_base = OTHER; note = phosphorothioate linkage
  modified_base 21: mod_base = gm
  source 1..21: mol_type = other RNA
ttcttcagcatgtcccacttg

SEQ ID NO: 703 - RNA, 21 nt, synthetic construct
  modified_base 1: mod_base = OTHER; note = 2'-O-methyladenosine
  modified_base 1^2: mod_base = OTHER; note = phosphorothioate linkage
  modified_base 2: mod_base = OTHER; note = 2'-fluoroguanosine
  modified_base 2^3: mod_base = OTHER; note = phosphorothioate linkage
  modified_base 3: mod_base = gm
  modified_base 3^4: mod_base = OTHER; note = phosphorothioate linkage
  modified_base 4: mod_base = OTHER; note = 2'-fluorouridine
  modified_base 5: mod_base = OTHER; note = 2'-O-methyladenosine
  modified_base 6: mod_base = OTHER; note = 2'-fluoroguanosine
  modified_base 7: mod_base = um
  modified_base 8: mod_base = OTHER; note = 2'-fluorouridine
  modified_base 9: mod_base = cm
  modified_base 10: mod_base = OTHER; note = 2'-fluorouridine
  modified_base 11: mod_base = cm
  modified_base 12: mod_base = OTHER; note = 2'-fluoroadenosine
  modified_base 13: mod_base = um
  modified_base 14: mod_base = OTHER; note = 2'-fluorocytidine
  modified_base 15: mod_base = cm
  modified_base 16: mod_base = OTHER; note = 2'-fluorouridine
  modified_base 17: mod_base = gm
  modified_base 18: mod_base = OTHER; note = 2'-fluoroguanosine
  modified_base 19: mod_base = OTHER; note = 2'-O-methyladenosine
  modified_base 20: mod_base = OTHER; note = 2'-fluoroadenosine
  modified_base 20^21: mod_base = OTHER; note = phosphorothioate linkage
  modified_base 21: mod_base = gm
  source 1..21: mol_type = other RNA
aggtagttctcatcctggaag

SEQ ID NO: 704 - RNA, 21 nt, synthetic construct
  modified_base 1: mod_base = OTHER; note = 2'-O-methyladenosine
  modified_base 1^2: mod_base = OTHER; note = phosphorothioate linkage
  modified_base 2: mod_base = OTHER; note = 2'-fluorocytidine
  modified_base 2^3: mod_base = OTHER; note = phosphorothioate linkage
  modified_base 3: mod_base = OTHER; note = 2'-O-methyladenosine
  modified_base 3^4: mod_base = OTHER; note = phosphorothioate linkage
  modified_base 4: mod_base = OTHER; note = 2'-fluoroguanosine
  modified_base 5: mod_base = gm
  modified_base 6: mod_base = OTHER; note = 2'-fluorouridine
  modified_base 7: mod_base = OTHER; note = 2'-O-methyladenosine
  modified_base 8: mod_base = OTHER; note = 2'-fluoroguanosine
  modified_base 9: mod_base = um
  modified_base 10: mod_base = OTHER; note = 2'-fluorouridine
  modified_base 11: mod_base = cm
  modified_base 12: mod_base = OTHER; note = 2'-fluorouridine
  modified_base 13: mod_base = cm
  modified_base 14: mod_base = OTHER; note = 2'-fluoroadenosine
  modified_base 15: mod_base = um
  modified_base 16: mod_base = OTHER; note = 2'-fluorocytidine
  modified_base 17: mod_base = cm
  modified_base 18: mod_base = OTHER; note = 2'-fluorouridine
  modified_base 19: mod_base = gm
  modified_base 20: mod_base = OTHER; note = 2'-fluoroguanosine
  modified_base 20^21: mod_base = OTHER; note = phosphorothioate linkage
  modified_base 21: mod_base = OTHER; note = 2'-O-methyladenosine
  source 1..21: mol_type = other RNA
acaggtagttctcatcctgga

SEQ ID NO: 705 - RNA, 21 nt, synthetic construct
  modified_base 1: mod_base = um
  modified_base 1^2: mod_base = OTHER; note = phosphorothioate linkage
  modified_base 2: mod_base = OTHER; note = 2'-fluoroguanosine
  modified_base 2^3: mod_base = OTHER; note = phosphorothioate linkage
  modified_base 3: mod_base = um
  modified_base 3^4: mod_base = OTHER; note = phosphorothioate linkage
  modified_base 4: mod_base = OTHER; note = 2'-fluoroadenosine
  modified_base 5: mod_base = cm
  modified_base 6: mod_base = OTHER; note = 2'-fluoroadenosine
  modified_base 7: mod_base = gm
  modified_base 8: mod_base = OTHER; note = 2'-fluoroguanosine
  modified_base 9: mod_base = um
  modified_base 10: mod_base = OTHER; note = 2'-fluoroadenosine
  modified_base 11: mod_base = gm
  modified_base 12: mod_base = OTHER; note = 2'-fluorouridine
  modified_base 13: mod_base = um
  modified_base 14: mod_base = OTHER; note = 2'-fluorocytidine
  modified_base 15: mod_base = um
  modified_base 16: mod_base = OTHER; note = 2'-fluorocytidine
  modified_base 17: mod_base = OTHER; note = 2'-O-methyladenosine
  modified_base 18: mod_base = OTHER; note = 2'-fluorouridine
  modified_base 19: mod_base = cm
  modified_base 20: mod_base = OTHER; note = 2'-fluorocytidine
  modified_base 20^21: mod_base = OTHER; note = phosphorothioate linkage
  modified_base 21: mod_base = um
  source 1..21: mol_type = other RNA
tgtacaggtagttctcatcct

SEQ ID NO: 706 - RNA, 21 nt, synthetic construct
  modified_base 1: mod_base = um
  modified_base 1^2: mod_base = OTHER; note = phosphorothioate linkage
  modified_base 2: mod_base = OTHER; note = 2'-fluorocytidine
  modified_base 2^3: mod_base = OTHER; note = phosphorothioate linkage
  modified_base 3: mod_base = cm
  modified_base 3^4: mod_base = OTHER; note = phosphorothioate linkage
  modified_base 4: mod_base = OTHER; note = 2'-fluoroadenosine
  modified_base 5: mod_base = um
  modified_base 6: mod_base = OTHER; note = 2'-fluoroguanosine
  modified_base 7: mod_base = OTHER; note = 2'-O-methyladenosine
  modified_base 8: mod_base = OTHER; note = 2'-fluorocytidine
  modified_base 9: mod_base = cm
  modified_base 10: mod_base = OTHER; note = 2'-fluoroadenosine
  modified_base 11: mod_base = gm
  modified_base 12: mod_base = OTHER; note = 2'-fluoroguanosine
  modified_base 13: mod_base = um
  modified_base 14: mod_base = OTHER; note = 2'-fluoroadenosine
  modified_base 15: mod_base = cm
  modified_base 16: mod_base = OTHER; note = 2'-fluoroadenosine
  modified_base 17: mod_base = gm
  modified_base 18: mod_base = OTHER; note = 2'-fluoroguanosine
  modified_base 19: mod_base = um
  modified_base 20: mod_base = OTHER; note = 2'-fluoroadenosine
  modified_base 20^21: mod_base = OTHER; note = phosphorothioate linkage
  modified_base 21: mod_base = gm
  source 1..21: mol_type = other RNA
tccatgaccaggtacaggtag

SEQ ID NO: 707 - RNA, 21 nt, synthetic construct
  modified_base 1: mod_base = um
  modified_base 1^2: mod_base = OTHER; note = phosphorothioate linkage
  modified_base 2: mod_base = OTHER; note = 2'-fluorocytidine
  modified_base 2^3: mod_base = OTHER; note = phosphorothioate linkage
  modified_base 3: mod_base = cm
  modified_base 3^4: mod_base = OTHER; note = phosphorothioate linkage
  modified_base 4: mod_base = OTHER; note = 2'-fluoroadenosine
  modified_base 5: mod_base = OTHER; note = 2'-O-methyladenosine
  modified_base 6: mod_base = OTHER; note = 2'-fluoroadenosine
  modified_base 7: mod_base = cm
  modified_base 8: mod_base = OTHER; note = 2'-fluorouridine
  modified_base 9: mod_base = um
  modified_base 10: mod_base = OTHER; note = 2'-fluoroguanosine
  modified_base 11: mod_base = cm
  modified_base 12: mod_base = OTHER; note = 2'-fluorouridine
  modified_base 13: mod_base = cm
  modified_base 14: mod_base = OTHER; note = 2'-fluoroadenosine
  modified_base 15: mod_base = gm
  modified_base 16: mod_base = OTHER; note = 2'-fluorocytidine
  modified_base 17: mod_base = OTHER; note = 2'-O-methyladenosine
  modified_base 18: mod_base = OTHER; note = 2'-fluoroguanosine
  modified_base 19: mod_base = um
  modified_base 20: mod_base = OTHER; note = 2'-fluoroguanosine
  modified_base 20^21: mod_base = OTHER; note = phosphorothioate linkage
  modified_base 21: mod_base = um
  source 1..21: mol_type = other RNA
tccaaacttgctcagcagtgt

SEQ ID NO: 708 - RNA, 21 nt, synthetic construct
  modified_base 1: mod_base = um
  modified_base 1^2: mod_base = OTHER; note = phosphorothioate linkage
  modified_base 2: mod_base = OTHER; note = 2'-fluorouridine
  modified_base 2^3: mod_base = OTHER; note = phosphorothioate linkage
  modified_base 3: mod_base = gm
  modified_base 3^4: mod_base = OTHER; note = phosphorothioate linkage
  modified_base 4: mod_base = OTHER; note = 2'-fluorouridine
  modified_base 5: mod_base = um
  modified_base 6: mod_base = OTHER; note = 2'-fluorocytidine
  modified_base 7: mod_base = OTHER; note = 2'-O-methyladenosine
  modified_base 8: mod_base = OTHER; note = 2'-fluorouridine
  modified_base 9: mod_base = gm
  modified_base 10: mod_base = OTHER; note = 2'-fluoroadenosine
  modified_base 11: mod_base = um
  modified_base 12: mod_base = OTHER; note = 2'-fluorocytidine
  modified_base 13: mod_base = um
  modified_base 14: mod_base = OTHER; note = 2'-fluorouridine
  modified_base 15: mod_base = cm
  modified_base 16: mod_base = OTHER; note = 2'-fluoroadenosine
  modified_base 17: mod_base = um
  modified_base 18: mod_base = OTHER; note = 2'-fluoroguanosine
  modified_base 19: mod_base = gm
  modified_base 20: mod_base = OTHER; note = 2'-fluorocytidine
  modified_base 20^21: mod_base = OTHER; note = phosphorothioate linkage
  modified_base 21: mod_base = OTHER; note = 2'-O-methyladenosine
  source 1..21: mol_type = other RNA
ttgttcatgatcttcatggca

SEQ ID NO: 709 - RNA, 21 nt, synthetic construct
  modified_base 1: mod_base = OTHER; note = 2'-O-methyladenosine
  modified_base 1^2: mod_base = OTHER; note = phosphorothioate linkage
  modified_base 2: mod_base = OTHER; note = 2'-fluorocytidine
  modified_base 2^3: mod_base = OTHER; note = phosphorothioate linkage
  modified_base 3: mod_base = um
  modified_base 3^4: mod_base = OTHER; note = phosphorothioate linkage
  modified_base 4: mod_base = OTHER; note = 2'-fluorouridine
  modified_base 5: mod_base = gm
  modified_base 6: mod_base = OTHER; note = 2'-fluorouridine
  modified_base 7: mod_base = um
  modified_base 8: mod_base = OTHER; note = 2'-fluorocytidine
  modified_base 9: mod_base = OTHER; note = 2'-O-methyladenosine
  modified_base 10: mod_base = OTHER; note = 2'-fluorouridine
  modified_base 11: mod_base = gm
  modified_base 12: mod_base = OTHER; note = 2'-fluoroadenosine
  modified_base 13: mod_base = um
  modified_base 14: mod_base = OTHER; note = 2'-fluorocytidine
  modified_base 15: mod_base = um
  modified_base 16: mod_base = OTHER; note = 2'-fluorouridine
  modified_base 17: mod_base = cm
  modified_base 18: mod_base = OTHER; note = 2'-fluoroadenosine
  modified_base 19: mod_base = um
  modified_base 20: mod_base = OTHER; note = 2'-fluoroguanosine
  modified_base 20^21: mod_base = OTHER; note = phosphorothioate linkage
  modified_base 21: mod_base = gm
  source 1..21: mol_type = other RNA
acttgttcatgatcttcatgg

SEQ ID NO: 710 - RNA, 21 nt, synthetic construct
  modified_base 1: mod_base = um
  modified_base 1^2: mod_base = OTHER; note = phosphorothioate linkage
  modified_base 2: mod_base = OTHER; note = 2'-fluoroadenosine
  modified_base 2^3: mod_base = OTHER; note = phosphorothioate linkage
  modified_base 3: mod_base = cm
  modified_base 3^4: mod_base = OTHER; note = phosphorothioate linkage
  modified_base 4: mod_base = OTHER; note = 2'-fluorouridine
  modified_base 5: mod_base = um
  modified_base 6: mod_base = OTHER; note = 2'-fluoroguanosine
  modified_base 7: mod_base = um
  modified_base 8: mod_base = OTHER; note = 2'-fluorouridine
  modified_base 9: mod_base = cm
  modified_base 10: mod_base = OTHER; note = 2'-fluoroadenosine
  modified_base 11: mod_base = um
  modified_base 12: mod_base = OTHER; note = 2'-fluoroguanosine
  modified_base 13: mod_base = OTHER; note = 2'-O-methyladenosine
  modified_base 14: mod_base = OTHER; note = 2'-fluorouridine
  modified_base 15: mod_base = cm
  modified_base 16: mod_base = OTHER; note = 2'-fluorouridine
  modified_base 17: mod_base = um
  modified_base 18: mod_base = OTHER; note = 2'-fluorocytidine
  modified_base 19: mod_base = OTHER; note = 2'-O-methyladenosine
  modified_base 20: mod_base = OTHER; note = 2'-fluorouridine
  modified_base 20^21: mod_base = OTHER; note = phosphorothioate linkage
  modified_base 21: mod_base = gm
  source 1..21: mol_type = other RNA
tacttgttcatgatcttcatg

SEQ ID NO: 711 - RNA, 21 nt, synthetic construct
  modified_base 1: mod_base = OTHER; note = 2'-O-methyladenosine
  modified_base 1^2: mod_base = OTHER; note = phosphorothioate linkage
  modified_base 2: mod_base = OTHER; note = 2'-fluorocytidine
  modified_base 2^3: mod_base = OTHER; note = phosphorothioate linkage
  modified_base 3: mod_base = um
  modified_base 3^4: mod_base = OTHER; note = phosphorothioate linkage
  modified_base 4: mod_base = OTHER; note = 2'-fluorouridine
  modified_base 5: mod_base = gm
  modified_base 6: mod_base = OTHER; note = 2'-fluorocytidine
  modified_base 7: mod_base = um
  modified_base 8: mod_base = OTHER; note = 2'-fluorocytidine
  modified_base 9: mod_base = OTHER; note = 2'-O-methyladenosine
  modified_base 10: mod_base = OTHER; note = 2'-fluoroguanosine
  modified_base 11: mod_base = cm
  modified_base 12: mod_base = OTHER; note = 2'-fluoroadenosine
  modified_base 13: mod_base = gm
  modified_base 14: mod_base = OTHER; note = 2'-fluorouridine
  modified_base 15: mod_base = gm
  modified_base 16: mod_base = OTHER; note = 2'-fluorouridine
  modified_base 17: mod_base = cm
  modified_base 18: mod_base = OTHER; note = 2'-fluoroadenosine
  modified_base 19: mod_base = gm
  modified_base 20: mod_base = OTHER; note = 2'-fluorocytidine
  modified_base 20^21: mod_base = OTHER; note = phosphorothioate linkage
  modified_base 21: mod_base = OTHER; note = 2'-O-methyladenosine
  source 1..21: mol_type = other RNA
acttgctcagcagtgtcagca

SEQ ID NO: 712 - RNA, 21 nt, synthetic construct
  modified_base 1: mod_base = um
  modified_base 1^2: mod_base = OTHER; note = phosphorothioate linkage
  modified_base 2: mod_base = OTHER; note = 2'-fluoroadenosine
  modified_base 2^3: mod_base = OTHER; note = phosphorothioate linkage
  modified_base 3: mod_base = OTHER; note = 2'-O-methyladenosine
  modified_base 3^4: mod_base = OTHER; note = phosphorothioate linkage
  modified_base 4: mod_base = OTHER; note = 2'-fluoroadenosine
  modified_base 5: mod_base = cm
  modified_base 6: mod_base = OTHER; note = 2'-fluorouridine
  modified_base 7: mod_base = um
  modified_base 8: mod_base = OTHER; note = 2'-fluoroguanosine
  modified_base 9: mod_base = cm
  modified_base 10: mod_base = OTHER; note = 2'-fluorouridine
  modified_base 11: mod_base = cm
  modified_base 12: mod_base = OTHER; note = 2'-fluoroadenosine
  modified_base 13: mod_base = gm
  modified_base 14: mod_base = OTHER; note = 2'-fluorocytidine
  modified_base 15: mod_base = OTHER; note = 2'-O-methyladenosine
  modified_base 16: mod_base = OTHER; note = 2'-fluoroguanosine
  modified_base 17: mod_base = um
  modified_base 18: mod_base = OTHER; note = 2'-fluoroguanosine
  modified_base 19: mod_base = um
  modified_base 20: mod_base = OTHER; note = 2'-fluorocytidine
  modified_base 20^21: mod_base = OTHER; note = phosphorothioate linkage
  modified_base 21: mod_base = OTHER; note = 2'-O-methyladenosine
  source 1..21: mol_type = other RNA
taaacttgctcagcagtgtca

SEQ ID NO: 713 - RNA, 21 nt, synthetic construct
  modified_base 1: mod_base = um
  modified_base 1^2: mod_base = OTHER; note = phosphorothioate linkage
  modified_base 2: mod_base = OTHER; note = 2'-fluoroguanosine
  modified_base 2^3: mod_base = OTHER; note = phosphorothioate linkage
  modified_base 3: mod_base = OTHER; note = 2'-O-methyladenosine
  modified_base 3^4: mod_base = OTHER; note = phosphorothioate linkage
  modified_base 4: mod_base = OTHER; note = 2'-fluorouridine
  modified_base 5: mod_base = gm
  modified_base 6: mod_base = OTHER; note = 2'-fluorouridine
  modified_base 7: mod_base = um
  modified_base 8: mod_base = OTHER; note = 2'-fluoroguanosine
  modified_base 9: mod_base = um
  modified_base 10: mod_base = OTHER; note = 2'-fluorocytidine
  modified_base 11: mod_base = gm
  modified_base 12: mod_base = OTHER; note = 2'-fluoroguanosine
  modified_base 13: mod_base = gm
  modified_base 14: mod_base = OTHER; note = 2'-fluorouridine
  modified_base 15: mod_base = um
  modified_base 16: mod_base = OTHER; note = 2'-fluorouridine
  modified_base 17: mod_base = gm
  modified_base 18: mod_base = OTHER; note = 2'-fluoroadenosine
  modified_base 19: mod_base = um
  modified_base 20: mod_base = OTHER; note = 2'-fluoroguanosine
  modified_base 20^21: mod_base = OTHER; note = phosphorothioate linkage
  modified_base 21: mod_base = cm
  source 1..21: mol_type = other RNA
tgatgttgtcgggtttgatgc

SEQ ID NO: 714 - RNA, 21 nt, synthetic construct
  modified_base 1: mod_base = um
  modified_base 1^2: mod_base = OTHER; note = phosphorothioate linkage
  modified_base 2: mod_base = OTHER; note = 2'-fluorocytidine
  modified_base 2^3: mod_base = OTHER; note = phosphorothioate linkage
  modified_base 3: mod_base = OTHER; note = 2'-O-methyladenosine
  modified_base 3^4: mod_base = OTHER; note = phosphorothioate linkage
  modified_base 4: mod_base = OTHER; note = 2'-fluoroguanosine
  modified_base 5: mod_base = gm
  modified_base 6: mod_base = OTHER; note = 2'-fluoroadenosine
  modified_base 7: mod_base = um
  modified_base 8: mod_base = OTHER; note = 2'-fluoroguanosine
  modified_base 9: mod_base = um
  modified_base 10: mod_base = OTHER; note = 2'-fluorouridine
  modified_base 11: mod_base = gm
  modified_base 12: mod_base = OTHER; note = 2'-fluorouridine
  modified_base 13: mod_base = cm
  modified_base 14: mod_base = OTHER; note = 2'-fluoroguanosine
  modified_base 15: mod_base = gm
  modified_base 16: mod_base = OTHER; note = 2'-fluoroguanosine
  modified_base 17: mod_base = um
  modified_base 18: mod_base = OTHER; note = 2'-fluorouridine
  modified_base 19: mod_base = um
  modified_base 20: mod_base = OTHER; note = 2'-fluoroguanosine
  modified_base 20^21: mod_base = OTHER; note = phosphorothioate linkage
  modified_base 21: mod_base = cm
  source 1..21: mol_type = other RNA
tcaggatgttgtcgggtttgc

SEQ ID NO: 715 - RNA, 21 nt, synthetic construct
  modified_base 1: mod_base = um
  modified_base 1^2: mod_base = OTHER; note = phosphorothioate linkage
  modified_base 2: mod_base = OTHER; note = 2'-fluorocytidine
  modified_base 2^3: mod_base = OTHER; note = phosphorothioate linkage
  modified_base 3: mod_base = cm
  modified_base 3^4: mod_base = OTHER; note = phosphorothioate linkage
  modified_base 4: mod_base = OTHER; note = 2'-fluorouridine
  modified_base 5: mod_base = um
  modified_base 6: mod_base = OTHER; note = 2'-fluoroguanosine
  modified_base 7: mod_base = um
  modified_base 8: mod_base = OTHER; note = 2'-fluoroadenosine
  modified_base 9: mod_base = gm
  modified_base 10: mod_base = OTHER; note = 2'-fluorouridine
  modified_base 11: mod_base = gm
  modified_base 12: mod_base = OTHER; note = 2'-fluoroguanosine
  modified_base 13: mod_base = OTHER; note = 2'-O-methyladenosine
  modified_base 14: mod_base = OTHER; note = 2'-fluorocytidine
  modified_base 15: mod_base = gm
  modified_base 16: mod_base = OTHER; note = 2'-fluoroadenosine
  modified_base 17: mod_base = um
  modified_base 18: mod_base = OTHER; note = 2'-fluorocytidine
  modified_base 19: mod_base = um
  modified_base 20: mod_base = OTHER; note = 2'-fluorouridine
  modified_base 20^21: mod_base = OTHER; note = phosphorothioate linkage
  modified_base 21: mod_base = gm
  source 1..21: mol_type = other RNA
tccttgtagtggacgatcttg

SEQ ID NO: 716 - RNA, 21 nt, synthetic construct
  modified_base 1: mod_base = OTHER; note = 2'-O-methyladenosine
  modified_base 1^2: mod_base = OTHER; note = phosphorothioate linkage
  modified_base 2: mod_base = OTHER; note = 2'-fluoroguanosine
  modified_base 2^3: mod_base = OTHER; note = phosphorothioate linkage
  modified_base 3: mod_base = OTHER; note = 2'-O-methyladenosine
  modified_base 3^4: mod_base = OTHER; note = phosphorothioate linkage
  modified_base 4: mod_base = OTHER; note = 2'-fluoroguanosine
  modified_base 5: mod_base = OTHER; note = 2'-O-methyladenosine
  modified_base 6: mod_base = OTHER; note = 2'-fluoroguanosine
  modified_base 7: mod_base = OTHER; note = 2'-O-methyladenosine
  modified_base 8: mod_base = OTHER; note = 2'-fluoroguanosine
  modified_base 9: mod_base = gm
  modified_base 10: mod_base = OTHER; note = 2'-fluorouridine
  modified_base 11: mod_base = gm
  modified_base 12: mod_base = OTHER; note = 2'-fluorocytidine
  modified_base 13: mod_base = um
  modified_base 14: mod_base = OTHER; note = 2'-fluorocytidine
  modified_base 15: mod_base = cm
  modified_base 16: mod_base = OTHER; note = 2'-fluorouridine
  modified_base 17: mod_base = um
  modified_base 18: mod_base = OTHER; note = 2'-fluoroguanosine
  modified_base 19: mod_base = um
  modified_base 20: mod_base = OTHER; note = 2'-fluoroadenosine
  modified_base 20^21: mod_base = OTHER; note = phosphorothioate linkage
  modified_base 21: mod_base = gm
  source 1..21: mol_type = other RNA
agagagaggtgctccttgtag

SEQ ID NO: 717 - RNA, 21 nt, synthetic construct
  modified_base 1: mod_base = OTHER; note = 2'-O-methyladenosine
  modified_base 1^2: mod_base = OTHER; note = phosphorothioate linkage
  modified_base 2: mod_base = OTHER; note = 2'-fluoroadenosine
  modified_base 2^3: mod_base = OTHER; note = phosphorothioate linkage
  modified_base 3: mod_base = OTHER; note = 2'-O-methyladenosine
  modified_base 3^4: mod_base = OTHER; note = phosphorothioate linkage
  modified_base 4: mod_base = OTHER; note = 2'-fluoroguanosine
  modified_base 5: mod_base = OTHER; note = 2'-O-methyladenosine
  modified_base 6: mod_base = OTHER; note = 2'-fluoroadenosine
  modified_base 7: mod_base = gm
  modified_base 8: mod_base = OTHER; note = 2'-fluoroadenosine
  modified_base 9: mod_base = OTHER; note = 2'-O-methyladenosine
  modified_base 10: mod_base = OTHER; note = 2'-fluoroguanosine
  modified_base 11: mod_base = gm
  modified_base 12: mod_base = OTHER; note = 2'-fluoroguanosine
  modified_base 13: mod_base = OTHER; note = 2'-O-methyladenosine
  modified_base 14: mod_base = OTHER; note = 2'-fluorouridine
  modified_base 15: mod_base = gm
  modified_base 16: mod_base = OTHER; note = 2'-fluorouridine
  modified_base 17: mod_base = gm
  modified_base 18: mod_base = OTHER; note = 2'-fluorouridine
  modified_base 19: mod_base = cm
  modified_base 20: mod_base = OTHER; note = 2'-fluorocytidine
  modified_base 20^21: mod_base = OTHER; note = phosphorothioate linkage
  modified_base 21: mod_base = gm
  source 1..21: mol_type = other RNA
aaagaagaagggatgtgtccg

SEQ ID NO: 718 - RNA, 21 nt, synthetic construct
  modified_base 1: mod_base = um
  modified_base 1^2: mod_base = OTHER; note = phosphorothioate linkage
  modified_base 2: mod_base = OTHER; note = 2'-fluorocytidine
  modified_base 2^3: mod_base = OTHER; note = phosphorothioate linkage
  modified_base 3: mod_base = OTHER; note = 2'-O-methyladenosine
  modified_base 3^4: mod_base = OTHER; note = phosphorothioate linkage
  modified_base 4: mod_base = OTHER; note = 2'-fluoroadenosine
  modified_base 5: mod_base = OTHER; note = 2'-O-methyladenosine
  modified_base 6: mod_base = OTHER; note = 2'-fluoroguanosine
  modified_base 7: mod_base = OTHER; note = 2'-O-methyladenosine
  modified_base 8: mod_base = OTHER; note = 2'-fluoroadenosine
  modified_base 9: mod_base = gm
  modified_base 10: mod_base = OTHER; note = 2'-fluoroadenosine
  modified_base 11: mod_base = OTHER; note = 2'-O-methyladenosine
  modified_base 12: mod_base = OTHER; note = 2'-fluoroguanosine
  modified_base 13: mod_base = gm
  modified_base 14: mod_base = OTHER; note = 2'-fluoroguanosine
  modified_base 15: mod_base = OTHER; note = 2'-O-methyladenosine
  modified_base 16: mod_base = OTHER; note = 2'-fluorouridine
  modified_base 17: mod_base = gm
  modified_base 18: mod_base = OTHER; note = 2'-fluorouridine
  modified_base 19: mod_base = gm
  modified_base 20: mod_base = OTHER; note = 2'-fluorouridine
  modified_base 20^21: mod_base = OTHER; note = phosphorothioate linkage
  modified_base 21: mod_base = cm
  source 1..21: mol_type = other RNA
tcaaagaagaagggatgtgtc

SEQ ID NO: 719 - RNA, 21 nt, synthetic construct
  modified_base 1: mod_base = um
  modified_base 1^2: mod_base = OTHER; note = phosphorothioate linkage
  modified_base 2: mod_base = OTHER; note = 2'-fluorouridine
  modified_base 2^3: mod_base = OTHER; note = phosphorothioate linkage
  modified_base 3: mod_base = um
  modified_base 3^4: mod_base = OTHER; note = phosphorothioate linkage
  modified_base 4: mod_base = OTHER; note = 2'-fluorocytidine
  modified_base 5: mod_base = gm
  modified_base 6: mod_base = OTHER; note = 2'-fluoroadenosine
  modified_base 7: mod_base = OTHER; note = 2'-O-methyladenosine
  modified_base 8: mod_base = OTHER; note = 2'-fluoroadenosine
  modified_base 9: mod_base = um
  modified_base 10: mod_base = OTHER; note = 2'-fluorocytidine
  modified_base 11: mod_base = cm
  modified_base 12: mod_base = OTHER; note = 2'-fluoroguanosine
  modified_base 13: mod_base = gm
  modified_base 14: mod_base = OTHER; note = 2'-fluorouridine
  modified_base 15: mod_base = gm
  modified_base 16: mod_base = OTHER; note = 2'-fluorouridine
  modified_base 17: mod_base = OTHER; note = 2'-O-methyladenosine
  modified_base 18: mod_base = OTHER; note = 2'-fluoroadenosine
  modified_base 19: mod_base = OTHER; note = 2'-O-methyladenosine
  modified_base 20: mod_base = OTHER; note = 2'-fluoroguanosine
  modified_base 20^21: mod_base = OTHER; note = phosphorothioate linkage
  modified_base 21: mod_base = gm
  source 1..21: mol_type = other RNA
tttcgaaatccggtgtaaagg

SEQ ID NO: 720 - RNA, 21 nt, synthetic construct
  modified_base 1: mod_base = um
  modified_base 1^2: mod_base = OTHER; note = phosphorothioate linkage
  modified_base 2: mod_base = OTHER; note = 2'-fluorocytidine
  modified_base 2^3: mod_base = OTHER; note = phosphorothioate linkage
  modified_base 3: mod_base = OTHER; note = 2'-O-methyladenosine
  modified_base 3^4: mod_base = OTHER; note = phosphorothioate linkage
  modified_base 4: mod_base = OTHER; note = 2'-fluorocytidine
  modified_base 5: mod_base = cm
  modified_base 6: mod_base = OTHER; note = 2'-fluorouridine
  modified_base 7: mod_base = um
  modified_base 8: mod_base = OTHER; note = 2'-fluorocytidine
  modified_base 9: mod_base = gm
  modified_base 10: mod_base = OTHER; note = 2'-fluoroadenosine
  modified_base 11: mod_base = OTHER; note = 2'-O-methyladenosine
  modified_base 12: mod_base = OTHER; note = 2'-fluoroadenosine
  modified_base 13: mod_base = um
  modified_base 14: mod_base = OTHER; note = 2'-fluorocytidine
  modified_base 15: mod_base = cm
  modified_base 16: mod_base = OTHER; note = 2'-fluoroguanosine
  modified_base 17: mod_base = gm
  modified_base 18: mod_base = OTHER; note = 2'-fluorouridine
  modified_base 19: mod_base = gm
  modified_base 20: mod_base = OTHER; note = 2'-fluorouridine
  modified_base 20^21: mod_base = OTHER; note = phosphorothioate linkage
  modified_base 21: mod_base = OTHER; note = 2'-O-methyladenosine
  source 1..21: mol_type = other RNA
tcaccttcgaaatccggtgta

SEQ ID NO: 721 - RNA, 21 nt, synthetic construct
  modified_base 1: mod_base = um
  modified_base 1^2: mod_base = OTHER; note = phosphorothioate linkage
  modified_base 2: mod_base = OTHER; note = 2'-fluorocytidine
  modified_base 2^3: mod_base = OTHER; note = phosphorothioate linkage
  modified_base 3: mod_base = gm
  modified_base 3^4: mod_base = OTHER; note = phosphorothioate linkage
  modified_base 4: mod_base = OTHER; note = 2'-fluoroadenosine
  modified_base 5: mod_base = OTHER; note = 2'-O-methyladenosine
  modified_base 6: mod_base = OTHER; note = 2'-fluoroguanosine
  modified_base 7: mod_base = um
  modified_base 8: mod_base = OTHER; note = 2'-fluorouridine
  modified_base 9: mod_base = gm
  modified_base 10: mod_base = OTHER; note = 2'-fluorocytidine
  modified_base 11: mod_base = OTHER; note = 2'-O-methyladenosine
  modified_base 12: mod_base = OTHER; note = 2'-fluorouridine
  modified_base 13: mod_base = gm
  modified_base 14: mod_base = OTHER; note = 2'-fluorouridine
  modified_base 15: mod_base = gm
  modified_base 16: mod_base = OTHER; note = 2'-fluorouridine
  modified_base 17: mod_base = cm
  modified_base 18: mod_base = OTHER; note = 2'-fluoroguanosine
  modified_base 19: mod_base = gm
  modified_base 20: mod_base = OTHER; note = 2'-fluorouridine
  modified_base 20^21: mod_base = OTHER; note = phosphorothioate linkage
  modified_base 21: mod_base = gm
  source 1..21: mol_type = other RNA
tcgaagttgcatgtgtcggtg

SEQ ID NO: 722 - RNA, 21 nt, synthetic construct
  modified_base 1: mod_base = OTHER; note = 2'-O-methyladenosine
  modified_base 1^2: mod_base = OTHER; note = phosphorothioate linkage
  modified_base 2: mod_base = OTHER; note = 2'-fluoroguanosine
  modified_base 2^3: mod_base = OTHER; note = phosphorothioate linkage
  modified_base 3: mod_base = um
  modified_base 3^4: mod_base = OTHER; note = phosphorothioate linkage
  modified_base 4: mod_base = OTHER; note = 2'-fluorocytidine
  modified_base 5: mod_base = gm
  modified_base 6: mod_base = OTHER; note = 2'-fluoroadenosine
  modified_base 7: mod_base = OTHER; note = 2'-O-methyladenosine
  modified_base 8: mod_base = OTHER; note = 2'-fluoroguanosine
  modified_base 9: mod_base = um
  modified_base 10: mod_base = OTHER; note = 2'-fluorouridine
  modified_base 11: mod_base = gm
  modified_base 12: mod_base = OTHER; note = 2'-fluorocytidine
  modified_base 13: mod_base = OTHER; note = 2'-O-methyladenosine
  modified_base 14: mod_base = OTHER; note = 2'-fluorouridine
  modified_base 15: mod_base = gm
  modified_base 16: mod_base = OTHER; note = 2'-fluorouridine
  modified_base 17: mod_base = gm
  modified_base 18: mod_base = OTHER; note = 2'-fluorouridine
  modified_base 19: mod_base = cm
  modified_base 20: mod_base = OTHER; note = 2'-fluoroguanosine
  modified_base 20^21: mod_base = OTHER; note = phosphorothioate linkage
  modified_base 21: mod_base = gm
  source 1..21: mol_type = other RNA
agtcgaagttgcatgtgtcgg

SEQ ID NO: 723 - RNA, 21 nt, synthetic construct
  modified_base 1: mod_base = um
  modified_base 1^2: mod_base = OTHER; note = phosphorothioate linkage
  modified_base 2: mod_base = OTHER; note = 2'-fluoroadenosine
  modified_base 2^3: mod_base = OTHER; note = phosphorothioate linkage
  modified_base 3: mod_base = cm
  modified_base 3^4: mod_base = OTHER; note = phosphorothioate linkage
  modified_base 4: mod_base = OTHER; note = 2'-fluorocytidine
  modified_base 5: mod_base = OTHER; note = 2'-O-methyladenosine
  modified_base 6: mod_base = OTHER; note = 2'-fluoroadenosine
  modified_base 7: mod_base = gm
  modified_base 8: mod_base = OTHER; note = 2'-fluorouridine
  modified_base 9: mod_base = cm
  modified_base 10: mod_base = OTHER; note = 2'-fluoroguanosine
  modified_base 11: mod_base = OTHER; note = 2'-O-methyladenosine
  modified_base 12: mod_base = OTHER; note = 2'-fluoroadenosine
  modified_base 13: mod_base = gm
  modified_base 14: mod_base = OTHER; note = 2'-fluorouridine
  modified_base 15: mod_base = um
  modified_base 16: mod_base = OTHER; note = 2'-fluoroguanosine
  modified_base 17: mod_base = cm
  modified_base 18: mod_base = OTHER; note = 2'-fluoroadenosine
  modified_base 19: mod_base = um
  modified_base 20: mod_base = OTHER; note = 2'-fluoroguanosine
  modified_base 20^21: mod_base = OTHER; note = phosphorothioate linkage
  modified_base 21: mod_base = um
  source 1..21: mol_type = other RNA
taccaagtcgaagttgcatgt

SEQ ID NO: 724 - RNA, 21 nt, synthetic construct
  modified_base 1: mod_base = OTHER; note = 5 -cyclopropyl phosphonate-2 -O-methyluridine
  modified_base 1^2: mod_base = OTHER; note = phosphorothioate linkage
  modified_base 2: mod_base = OTHER; note = 2'-fluoroadenosine
  modified_base 2^3: mod_base = OTHER; note = phosphorothioate linkage
  modified_base 3: mod_base = gm
  modified_base 4: mod_base = OTHER; note = 2'-O-methyladenosine
  modified_base 5: mod_base = cm
  modified_base 6: mod_base = OTHER; note = 2'-O-methyladenosine
  modified_base 7: mod_base = OTHER; note = 2'-O-methyladenosine
  modified_base 8: mod_base = um
  modified_base 9: mod_base = OTHER; note = 2'-O-methyladenosine
  modified_base 10: mod_base = OTHER; note = 2'-fluoroadenosine
  modified_base 11: mod_base = OTHER; note = 2'-O-methyladenosine
  modified_base 12: mod_base = OTHER; note = 2'-fluorouridine
  modified_base 13: mod_base = OTHER; note = 2'-O-methyladenosine
  modified_base 14: mod_base = OTHER; note = 2'-fluorocytidine
  modified_base 15: mod_base = cm
  modified_base 16: mod_base = OTHER; note = 2'-fluoroguanosine
  modified_base 17: mod_base = OTHER; note = 2'-O-methyladenosine
  modified_base 18: mod_base = gm
  modified_base 19: mod_base = gm
  modified_base 20: mod_base = OTHER; note = 2'-O-methyladenosine
  modified_base 20^21: mod_base = OTHER; note = phosphorothioate linkage
  modified_base 21: mod_base = OTHER; note = 2'-O-methyladenosine
  source 1..21: mol_type = other RNA
tagacaataaataccgaggaa

SEQ ID NO: 725 - RNA, 21 nt, synthetic construct
  modified_base 1: mod_base = um
  modified_base 1^2: mod_base = OTHER; note = phosphorothioate linkage
  modified_base 2: mod_base = OTHER; note = 2'-fluoroadenosine
  modified_base 2^3: mod_base = OTHER; note = phosphorothioate linkage
  modified_base 3: mod_base = gm
  modified_base 3^4: mod_base = OTHER; note = phosphorothioate linkage
  modified_base 4: mod_base = OTHER; note = 2'-O-methyladenosine
  modified_base 5: mod_base = cm
  modified_base 6: mod_base = OTHER; note = 2'-O-methyladenosine
  modified_base 7: mod_base = OTHER; note = 2'-O-methyladenosine
  modified_base 8: mod_base = um
  modified_base 9: mod_base = OTHER; note = 2'-O-methyladenosine
  modified_base 10: mod_base = OTHER; note = 2'-fluoroadenosine
  modified_base 11: mod_base = OTHER; note = 2'-O-methyladenosine
  modified_base 12: mod_base = OTHER; note = 2'-fluorouridine
  modified_base 13: mod_base = OTHER; note = 2'-O-methyladenosine
  modified_base 14: mod_base = OTHER; note = 2'-fluorocytidine
  modified_base 15: mod_base = cm
  modified_base 16: mod_base = OTHER; note = 2'-fluoroguanosine
  modified_base 17: mod_base = OTHER; note = 2'-O-methyladenosine
  modified_base 18: mod_base = gm
  modified_base 19: mod_base = gm
  modified_base 20: mod_base = OTHER; note = 2'-O-methyladenosine
  modified_base 20^21: mod_base = OTHER; note = phosphorothioate linkage
  modified_base 21: mod_base = OTHER; note = 2'-O-methyladenosine
  source 1..21: mol_type = other RNA
tagacaataaataccgaggaa

SEQ ID NO: 726 - RNA, 21 nt, synthetic construct
  modified_base 1: mod_base = OTHER; note = 2'-O-methyladenosine
  modified_base 1^2: mod_base = OTHER; note = phosphorothioate linkage
  modified_base 2: mod_base = OTHER; note = 2'-fluorocytidine
  modified_base 2^3: mod_base = OTHER; note = phosphorothioate linkage
  modified_base 3: mod_base = OTHER; note = 2'-fluoroguanosine
  modified_base 3^4: mod_base = OTHER; note = phosphorothioate linkage
  modified_base 4: mod_base = OTHER; note = 2'-fluorouridine
  modified_base 5: mod_base = OTHER; note = 2'-fluoroadenosine
  modified_base 6: mod_base = OTHER; note = 2'-O-methyladenosine
  modified_base 7: mod_base = um
  modified_base 8: mod_base = OTHER; note = 2'-O-methyladenosine
  modified_base 9: mod_base = cm
  modified_base 10: mod_base = um
  modified_base 11: mod_base = cm
  modified_base 12: mod_base = OTHER; note = 2'-fluorocytidine
  modified_base 13: mod_base = OTHER; note = 2'-O-methyladenosine
  modified_base 14: mod_base = OTHER; note = 2'-fluorouridine
  modified_base 15: mod_base = gm
  modified_base 16: mod_base = OTHER; note = 2'-fluoroadenosine
  modified_base 17: mod_base = cm
  modified_base 18: mod_base = cm
  modified_base 19: mod_base = OTHER; note = 2'-O-methyladenosine
  modified_base 20: mod_base = gm
  modified_base 20^21: mod_base = OTHER; note = phosphorothioate linkage
  modified_base 21: mod_base = gm
  source 1..21: mol_type = other RNA
acgtaatactccatgaccagg

SEQ ID NO: 727 - RNA, 21 nt, synthetic construct
  modified_base 1: mod_base = OTHER; note = 2'-O-methyladenosine
  modified_base 1^2: mod_base = OTHER; note = phosphorothioate linkage
  modified_base 2: mod_base = OTHER; note = 2'-fluorocytidine
  modified_base 2^3: mod_base = OTHER; note = phosphorothioate linkage
  modified_base 3: mod_base = OTHER; note = 2'-fluoroguanosine
  modified_base 3^4: mod_base = OTHER; note = phosphorothioate linkage
  modified_base 4: mod_base = um
  modified_base 5: mod_base = OTHER; note = 2'-O-methyladenosine
  modified_base 6: mod_base = OTHER; note = 2'-fluoroadenosine
  modified_base 7: mod_base = um
  modified_base 8: mod_base = OTHER; note = 2'-O-methyladenosine
  modified_base 9: mod_base = OTHER; note = 2'-fluorocytidine
  modified_base 10: mod_base = um
  modified_base 11: mod_base = cm
  modified_base 12: mod_base = OTHER; note = 2'-fluorocytidine
  modified_base 13: mod_base = OTHER; note = 2'-O-methyladenosine
  modified_base 14: mod_base = OTHER; note = 2'-fluorouridine
  modified_base 15: mod_base = gm
  modified_base 16: mod_base = OTHER; note = 2'-fluoroadenosine
  modified_base 17: mod_base = cm
  modified_base 18: mod_base = cm
  modified_base 19: mod_base = OTHER; note = 2'-O-methyladenosine
  modified_base 20: mod_base = gm
  modified_base 20^21: mod_base = OTHER; note = phosphorothioate linkage
  modified_base 21: mod_base = gm
  source 1..21: mol_type = other RNA
acgtaatactccatgaccagg

SEQ ID NO: 728 - RNA, 21 nt, synthetic construct
  modified_base 1: mod_base = OTHER; note = 2'-O-methyladenosine
  modified_base 1^2: mod_base = OTHER; note = phosphorothioate linkage
  modified_base 2: mod_base = OTHER; note = 2'-fluorocytidine
  modified_base 2^3: mod_base = OTHER; note = phosphorothioate linkage
  modified_base 3: mod_base = gm
  modified_base 3^4: mod_base = OTHER; note = phosphorothioate linkage
  modified_base 4: mod_base = OTHER; note = 2'-fluorouridine
  modified_base 5: mod_base = OTHER; note = 2'-O-methyladenosine
  modified_base 6: mod_base = OTHER; note = 2'-fluoroadenosine
  modified_base 7: mod_base = um
  modified_base 8: mod_base = OTHER; note = 2'-O-methyladenosine
  modified_base 9: mod_base = OTHER; note = 2'-fluorocytidine
  modified_base 10: mod_base = um
  modified_base 11: mod_base = cm
  modified_base 12: mod_base = OTHER; note = 2'-fluorocytidine
  modified_base 13: mod_base = OTHER; note = 2'-O-methyladenosine
  modified_base 14: mod_base = OTHER; note = 2'-fluorouridine
  modified_base 15: mod_base = gm
  modified_base 16: mod_base = OTHER; note = 2'-fluoroadenosine
  modified_base 17: mod_base = cm
  modified_base 18: mod_base = cm
  modified_base 19: mod_base = OTHER; note = 2'-O-methyladenosine
  modified_base 20: mod_base = gm
  modified_base 20^21: mod_base = OTHER; note = phosphorothioate linkage
  modified_base 21: mod_base = gm
  source 1..21: mol_type = other RNA
acgtaatactccatgaccagg

SEQ ID NO: 729 - RNA, 21 nt, synthetic construct
  modified_base 1: mod_base = OTHER; note = 2'-O-methyladenosine
  modified_base 1^2: mod_base = OTHER; note = phosphorothioate linkage
  modified_base 2: mod_base = OTHER; note = 2'-fluorocytidine
  modified_base 2^3: mod_base = OTHER; note = phosphorothioate linkage
  modified_base 3: mod_base = OTHER; note = 2'-fluoroguanosine
  modified_base 3^4: mod_base = OTHER; note = phosphorothioate linkage
  modified_base 4: mod_base = um
  modified_base 5: mod_base = OTHER; note = 2'-O-methyladenosine
  modified_base 6: mod_base = OTHER; note = 2'-O-methyladenosine
  modified_base 7: mod_base = um
  modified_base 8: mod_base = OTHER; note = 2'-O-methyladenosine
  modified_base 9: mod_base = cm
  modified_base 10: mod_base = um
  modified_base 11: mod_base = cm
  modified_base 12: mod_base = OTHER; note = 2'-fluorocytidine
  modified_base 13: mod_base = OTHER; note = 2'-O-methyladenosine
  modified_base 14: mod_base = OTHER; note = 2'-fluorouridine
  modified_base 15: mod_base = gm
  modified_base 16: mod_base = OTHER; note = 2'-fluoroadenosine
  modified_base 17: mod_base = cm
  modified_base 18: mod_base = cm
  modified_base 19: mod_base = OTHER; note = 2'-O-methyladenosine
  modified_base 20: mod_base = gm
  modified_base 20^21: mod_base = OTHER; note = phosphorothioate linkage
  modified_base 21: mod_base = gm
  source 1..21: mol_type = other RNA
acgtaatactccatgaccagg

SEQ ID NO: 730 - RNA, 21 nt, synthetic construct
  modified_base 1: mod_base = OTHER; note = 2'-O-methyladenosine
  modified_base 1^2: mod_base = OTHER; note = phosphorothioate linkage
  modified_base 2: mod_base = OTHER; note = 2'-fluorocytidine
  modified_base 2^3: mod_base = OTHER; note = phosphorothioate linkage
  modified_base 3: mod_base = gm
  modified_base 3^4: mod_base = OTHER; note = phosphorothioate linkage
  modified_base 4: mod_base = OTHER; note = 2'-fluorouridine
  modified_base 5: mod_base = OTHER; note = 2'-O-methyladenosine
  modified_base 6: mod_base = OTHER; note = 2'-O-methyladenosine
  modified_base 7: mod_base = um
  modified_base 8: mod_base = OTHER; note = 2'-O-methyladenosine
  modified_base 9: mod_base = cm
  modified_base 10: mod_base = um
  modified_base 11: mod_base = cm
  modified_base 12: mod_base = OTHER; note = 2'-fluorocytidine
  modified_base 13: mod_base = OTHER; note = 2'-O-methyladenosine
  modified_base 14: mod_base = OTHER; note = 2'-fluorouridine
  modified_base 15: mod_base = gm
  modified_base 16: mod_base = OTHER; note = 2'-fluoroadenosine
  modified_base 17: mod_base = cm
  modified_base 18: mod_base = cm
  modified_base 19: mod_base = OTHER; note = 2'-O-methyladenosine
  modified_base 20: mod_base = gm
  modified_base 20^21: mod_base = OTHER; note = phosphorothioate linkage
  modified_base 21: mod_base = gm
  source 1..21: mol_type = other RNA
acgtaatactccatgaccagg

SEQ ID NO: 731 - RNA, 21 nt, synthetic construct
  modified_base 1: mod_base = um
  modified_base 1^2: mod_base = OTHER; note = phosphorothioate linkage
  modified_base 2: mod_base = OTHER; note = 2'-fluorocytidine
  modified_base 2^3: mod_base = OTHER; note = phosphorothioate linkage
  modified_base 3: mod_base = gm
  modified_base 4: mod_base = OTHER; note = 2'-fluoroadenosine
  modified_base 5: mod_base = OTHER; note = 2'-O-methyladenosine
  modified_base 6: mod_base = OTHER; note = 2'-fluoroguanosine
  modified_base 7: mod_base = um
  modified_base 8: mod_base = OTHER; note = 2'-fluorouridine
  modified_base 9: mod_base = gm
  modified_base 10: mod_base = OTHER; note = 2'-fluorocytidine
  modified_base 11: mod_base = OTHER; note = 2'-O-methyladenosine
  modified_base 12: mod_base = OTHER; note = 2'-fluorouridine
  modified_base 13: mod_base = gm
  modified_base 14: mod_base = OTHER; note = 2'-fluorouridine
  modified_base 15: mod_base = gm
  modified_base 16: mod_base = OTHER; note = 2'-fluorouridine
  modified_base 17: mod_base = cm
  modified_base 18: mod_base = OTHER; note = 2'-fluoroguanosine
  modified_base 19: mod_base = gm
  modified_base 19^20: mod_base = OTHER; note = phosphorothioate linkage
  modified_base 20: mod_base = OTHER; note = 2'-fluorouridine
  modified_base 20^21: mod_base = OTHER; note = phosphorothioate linkage
  modified_base 21: mod_base = gm
  source 1..21: mol_type = other RNA
tcgaagttgcatgtgtcggtg

SEQ ID NO: 732 - RNA, 21 nt, synthetic construct
  modified_base 1: mod_base = um
  modified_base 1^2: mod_base = OTHER; note = phosphorothioate linkage
  modified_base 2: mod_base = OTHER; note = 2'-fluorocytidine
  modified_base 2^3: mod_base = OTHER; note = phosphorothioate linkage
  modified_base 3: mod_base = gm
  modified_base 4: mod_base = OTHER; note = 2'-fluoroadenosine
  modified_base 5: mod_base = OTHER; note = 2'-O-methyladenosine
  modified_base 6: mod_base = OTHER; note = 2'-fluoroguanosine
  modified_base 7: mod_base = um
  modified_base 8: mod_base = OTHER; note = 2'-fluorouridine
  modified_base 9: mod_base = gm
  modified_base 10: mod_base = OTHER; note = 2'-fluorocytidine
  modified_base 11: mod_base = OTHER; note = 2'-O-methyladenosine
  modified_base 12: mod_base = OTHER; note = 2'-fluorouridine
  modified_base 13: mod_base = gm
  modified_base 14: mod_base = OTHER; note = 2'-fluorouridine
  modified_base 15: mod_base = gm
  modified_base 16: mod_base = OTHER; note = 2'-fluorouridine
  modified_base 17: mod_base = cm
  modified_base 18: mod_base = OTHER; note = 2'-fluoroguanosine
  modified_base 19: mod_base = gm
  modified_base 20: mod_base = OTHER; note = 2'-fluorouridine
  modified_base 20^21: mod_base = OTHER; note = phosphorothioate linkage
  modified_base 21: mod_base = gm
  source 1..21: mol_type = other RNA
tcgaagttgcatgtgtcggtg

SEQ ID NO: 733 - RNA, 21 nt, synthetic construct
  modified_base 1: mod_base = um
  modified_base 1^2: mod_base = OTHER; note = phosphorothioate linkage
  modified_base 2: mod_base = OTHER; note = 2'-fluorocytidine
  modified_base 2^3: mod_base = OTHER; note = phosphorothioate linkage
  modified_base 3: mod_base = gm
  modified_base 3^4: mod_base = OTHER; note = phosphorothioate linkage
  modified_base 4: mod_base = OTHER; note = 2'-fluoroadenosine
  modified_base 5: mod_base = OTHER; note = 2'-O-methyladenosine
  modified_base 6: mod_base = gm
  modified_base 7: mod_base = um
  modified_base 8: mod_base = um
  modified_base 9: mod_base = gm
  modified_base 10: mod_base = cm
  modified_base 11: mod_base = OTHER; note = 2'-O-methyladenosine
  modified_base 12: mod_base = OTHER; note = 2'-fluorouridine
  modified_base 13: mod_base = gm
  modified_base 14: mod_base = OTHER; note = 2'-fluorouridine
  modified_base 15: mod_base = gm
  modified_base 16: mod_base = OTHER; note = 2'-fluorouridine
  modified_base 17: mod_base = cm
  modified_base 18: mod_base = gm
  modified_base 19: mod_base = gm
  modified_base 20: mod_base = um
  modified_base 20^21: mod_base = OTHER; note = phosphorothioate linkage
  modified_base 21: mod_base = gm
  source 1..21: mol_type = other RNA
tcgaagttgcatgtgtcggtg

SEQ ID NO: 734 - RNA, 21 nt, synthetic construct
  modified_base 1: mod_base = um
  modified_base 1^2: mod_base = OTHER; note = phosphorothioate linkage
  modified_base 2: mod_base = OTHER; note = 2'-fluorocytidine
  modified_base 2^3: mod_base = OTHER; note = phosphorothioate linkage
  modified_base 3: mod_base = gm
  modified_base 3^4: mod_base = OTHER; note = phosphorothioate linkage
  modified_base 4: mod_base = OTHER; note = 2'-O-methyladenosine
  modified_base 5: mod_base = OTHER; note = 2'-fluoroadenosine
  modified_base 6: mod_base = gm
  modified_base 7: mod_base = um
  modified_base 8: mod_base = um
  modified_base 9: mod_base = gm
  modified_base 10: mod_base = cm
  modified_base 11: mod_base = OTHER; note = 2'-O-methyladenosine
  modified_base 12: mod_base = OTHER; note = 2'-fluorouridine
  modified_base 13: mod_base = gm
  modified_base 14: mod_base = OTHER; note = 2'-fluorouridine
  modified_base 15: mod_base = gm
  modified_base 16: mod_base = OTHER; note = 2'-fluorouridine
  modified_base 17: mod_base = cm
  modified_base 18: mod_base = gm
  modified_base 19: mod_base = gm
  modified_base 20: mod_base = um
  modified_base 20^21: mod_base = OTHER; note = phosphorothioate linkage
  modified_base 21: mod_base = gm
  source 1..21: mol_type = other RNA
tcgaagttgcatgtgtcggtg

SEQ ID NO: 735 - RNA, 21 nt, synthetic construct
  modified_base 1: mod_base = um
  modified_base 1^2: mod_base = OTHER; note = phosphorothioate linkage
  modified_base 2: mod_base = OTHER; note = 2'-fluorocytidine
  modified_base 2^3: mod_base = OTHER; note = phosphorothioate linkage
  modified_base 3: mod_base = gm
  modified_base 3^4: mod_base = OTHER; note = phosphorothioate linkage
  modified_base 4: mod_base = OTHER; note = 2'-O-methyladenosine
  modified_base 5: mod_base = OTHER; note = 2'-O-methyladenosine
  modified_base 6: mod_base = gm
  modified_base 7: mod_base = OTHER; note = 2'-fluorouridine
  modified_base 8: mod_base = um
  modified_base 9: mod_base = gm
  modified_base 10: mod_base = cm
  modified_base 11: mod_base = OTHER; note = 2'-O-methyladenosine
  modified_base 12: mod_base = OTHER; note = 2'-fluorouridine
  modified_base 13: mod_base = gm
  modified_base 14: mod_base = OTHER; note = 2'-fluorouridine
  modified_base 15: mod_base = gm
  modified_base 16: mod_base = OTHER; note = 2'-fluorouridine
  modified_base 17: mod_base = cm
  modified_base 18: mod_base = gm
  modified_base 19: mod_base = gm
  modified_base 20: mod_base = um
  modified_base 20^21: mod_base = OTHER; note = phosphorothioate linkage
  modified_base 21: mod_base = gm
  source 1..21: mol_type = other RNA
tcgaagttgcatgtgtcggtg

SEQ ID NO: 736 - RNA, 21 nt, synthetic construct
  modified_base 1: mod_base = OTHER; note = 5 -cyclopropyl phosphonate-2 -O-methyluridine
  modified_base 1^2: mod_base = OTHER; note = phosphorothioate linkage
  modified_base 2: mod_base = OTHER; note = 2'-fluoroadenosine
  modified_base 2^3: mod_base = OTHER; note = phosphorothioate linkage
  modified_base 3: mod_base = cm
  modified_base 3^4: mod_base = OTHER; note = phosphorothioate linkage
  modified_base 4: mod_base = OTHER; note = 2'-fluoroadenosine
  modified_base 5: mod_base = gm
  modified_base 6: mod_base = OTHER; note = 2'-fluoroadenosine
  modified_base 7: mod_base = cm
  modified_base 8: mod_base = OTHER; note = 2'-fluoroadenosine
  modified_base 9: mod_base = OTHER; note = 2'-O-methyladenosine
  modified_base 10: mod_base = OTHER; note = 2'-fluorouridine
  modified_base 11: mod_base = OTHER; note = 2'-O-methyladenosine
  modified_base 12: mod_base = OTHER; note = 2'-fluoroadenosine
  modified_base 13: mod_base = OTHER; note = 2'-O-methyladenosine
  modified_base 14: mod_base = OTHER; note = 2'-fluorouridine
  modified_base 15: mod_base = OTHER; note = 2'-O-methyladenosine
  modified_base 16: mod_base = OTHER; note = 2'-fluorocytidine
  modified_base 17: mod_base = cm
  modified_base 18: mod_base = OTHER; note = 2'-fluoroguanosine
  modified_base 19: mod_base = OTHER; note = 2'-O-methyladenosine
  modified_base 20: mod_base = OTHER; note = 2'-fluoroguanosine
  modified_base 20^21: mod_base = OTHER; note = phosphorothioate linkage
  modified_base 21: mod_base = gm
  source 1..21: mol_type = other RNA
tacagacaataaataccgagg

SEQ ID NO: 737 - RNA, 21 nt, synthetic construct
  modified_base 1: mod_base = um
  modified_base 1^2: mod_base = OTHER; note = phosphorothioate linkage
  modified_base 2: mod_base = OTHER; note = 2'-O-methyladenosine
  modified_base 3: mod_base = gm
  modified_base 4: mod_base = OTHER; note = 2'-fluoroadenosine
  modified_base 5: mod_base = cm
  modified_base 6: mod_base = OTHER; note = 2'-O-methyladenosine
  modified_base 7: mod_base = OTHER; note = 2'-O-methyladenosine
  modified_base 8: mod_base = um
  modified_base 9: mod_base = OTHER; note = 2'-O-methyladenosine
  modified_base 10: mod_base = OTHER; note = 2'-fluoroadenosine
  modified_base 11: mod_base = OTHER; note = 2'-O-methyladenosine
  modified_base 12: mod_base = OTHER; note = 2'-fluorouridine
  modified_base 13: mod_base = OTHER; note = 2'-O-methyladenosine
  modified_base 14: mod_base = cm
  modified_base 15: mod_base = OTHER; note = 2'-fluorocytidine
  modified_base 16: mod_base = OTHER; note = 2'-fluoroguanosine
  modified_base 17: mod_base = OTHER; note = 2'-O-methyladenosine
  modified_base 18: mod_base = gm
  modified_base 19: mod_base = gm
  modified_base 20: mod_base = OTHER; note = 2'-O-methyladenosine
  modified_base 20^21: mod_base = OTHER; note = phosphorothioate linkage
  modified_base 21: mod_base = OTHER; note = 2'-O-methyladenosine
  source 1..21: mol_type = other RNA
tagacaataaataccgaggaa

SEQ ID NO: 738 - RNA, 21 nt, synthetic construct
  modified_base 1: mod_base = OTHER; note = 2'-O-methyladenosine
  modified_base 1^2: mod_base = OTHER; note = phosphorothioate linkage
  modified_base 2: mod_base = OTHER; note = 2'-fluorocytidine
  modified_base 2^3: mod_base = OTHER; note = phosphorothioate linkage
  modified_base 3: mod_base = OTHER; note = 2'-fluoroguanosine
  modified_base 4: mod_base = um
  modified_base 5: mod_base = OTHER; note = 2'-O-methyladenosine
  modified_base 6: mod_base = OTHER; note = 2'-fluoroadenosine
  modified_base 7: mod_base = um
  modified_base 8: mod_base = OTHER; note = 2'-O-methyladenosine
  modified_base 9: mod_base = OTHER; note = 2'-fluorocytidine
  modified_base 10: mod_base = um
  modified_base 11: mod_base = cm
  modified_base 12: mod_base = OTHER; note = 2'-fluorocytidine
  modified_base 13: mod_base = OTHER; note = 2'-O-methyladenosine
  modified_base 14: mod_base = OTHER; note = 2'-fluorouridine
  modified_base 15: mod_base = gm
  modified_base 16: mod_base = OTHER; note = 2'-fluoroadenosine
  modified_base 17: mod_base = cm
  modified_base 18: mod_base = cm
  modified_base 19: mod_base = OTHER; note = 2'-O-methyladenosine
  modified_base 20: mod_base = gm
  modified_base 20^21: mod_base = OTHER; note = phosphorothioate linkage
  modified_base 21: mod_base = gm
  source 1..21: mol_type = other RNA
acgtaatactccatgaccagg

SEQ ID NO: 739 - RNA, 21 nt, synthetic construct
  modified_base 1: mod_base = OTHER; note = 5 -cyclopropyl phosphonate-2 -O-methyladenosine
  modified_base 1^2: mod_base = OTHER; note = phosphorothioate linkage
  modified_base 2: mod_base = OTHER; note = 2'-fluorocytidine
  modified_base 2^3: mod_base = OTHER; note = phosphorothioate linkage
  modified_base 3: mod_base = OTHER; note = 2'-fluoroguanosine
  modified_base 4: mod_base = um
  modified_base 5: mod_base = OTHER; note = 2'-O-methyladenosine
  modified_base 6: mod_base = OTHER; note = 2'-fluoroadenosine
  modified_base 7: mod_base = um
  modified_base 8: mod_base = OTHER; note = 2'-O-methyladenosine
  modified_base 9: mod_base = OTHER; note = 2'-fluorocytidine
  modified_base 10: mod_base = um
  modified_base 11: mod_base = cm
  modified_base 12: mod_base = OTHER; note = 2'-fluorocytidine
  modified_base 13: mod_base = OTHER; note = 2'-O-methyladenosine
  modified_base 14: mod_base = OTHER; note = 2'-fluorouridine
  modified_base 15: mod_base = gm
  modified_base 16: mod_base = OTHER; note = 2'-fluoroadenosine
  modified_base 17: mod_base = cm
  modified_base 18: mod_base = cm
  modified_base 19: mod_base = OTHER; note = 2'-O-methyladenosine
  modified_base 20: mod_base = gm
  modified_base 20^21: mod_base = OTHER; note = phosphorothioate linkage
  modified_base 21: mod_base = gm
  source 1..21: mol_type = other RNA
acgtaatactccatgaccagg

SEQ ID NO: 740 - RNA, 21 nt, synthetic construct
  modified_base 1: mod_base = OTHER; note = 5 -cyclopropyl phosphonate-2 -O-methyluridine
  modified_base 1^2: mod_base = OTHER; note = phosphorothioate linkage
  modified_base 2: mod_base = OTHER; note = 2'-fluorocytidine
  modified_base 2^3: mod_base = OTHER; note = phosphorothioate linkage
  modified_base 3: mod_base = OTHER; note = 2'-fluoroguanosine
  modified_base 4: mod_base = um
  modified_base 5: mod_base = OTHER; note = 2'-O-methyladenosine
  modified_base 6: mod_base = OTHER; note = 2'-fluoroadenosine
  modified_base 7: mod_base = um
  modified_base 8: mod_base = OTHER; note = 2'-O-methyladenosine
  modified_base 9: mod_base = OTHER; note = 2'-fluorocytidine
  modified_base 10: mod_base = um
  modified_base 11: mod_base = cm
  modified_base 12: mod_base = OTHER; note = 2'-fluorocytidine
  modified_base 13: mod_base = OTHER; note = 2'-O-methyladenosine
  modified_base 14: mod_base = OTHER; note = 2'-fluorouridine
  modified_base 15: mod_base = gm
  modified_base 16: mod_base = OTHER; note = 2'-fluoroadenosine
  modified_base 17: mod_base = cm
  modified_base 18: mod_base = cm
  modified_base 19: mod_base = OTHER; note = 2'-O-methyladenosine
  modified_base 20: mod_base = gm
  modified_base 20^21: mod_base = OTHER; note = phosphorothioate linkage
  modified_base 21: mod_base = gm
  source 1..21: mol_type = other RNA
tcgtaatactccatgaccagg

SEQ ID NO: 741 - RNA, 21 nt, synthetic construct
  modified_base 1: mod_base = OTHER; note = 2'-O-methyladenosine
  modified_base 1^2: mod_base = OTHER; note = phosphorothioate linkage
  modified_base 2: mod_base = OTHER; note = 2'-fluorocytidine
  modified_base 2^3: mod_base = OTHER; note = phosphorothioate linkage
  modified_base 3: mod_base = OTHER; note = 2'-fluoroguanosine
  modified_base 3^4: mod_base = OTHER; note = phosphorothioate linkage
  modified_base 4: mod_base = um
  modified_base 5: mod_base = OTHER; note = 2'-fluoroadenosine
  modified_base 6: mod_base = OTHER; note = 2'-fluoroadenosine
  modified_base 7: mod_base = um
  modified_base 8: mod_base = OTHER; note = 2'-O-methyladenosine
  modified_base 9: mod_base = cm
  modified_base 10: mod_base = um
  modified_base 11: mod_base = cm
  modified_base 12: mod_base = OTHER; note = 2'-fluorocytidine
  modified_base 13: mod_base = OTHER; note = 2'-O-methyladenosine
  modified_base 14: mod_base = OTHER; note = 2'-fluorouridine
  modified_base 15: mod_base = gm
  modified_base 16: mod_base = OTHER; note = 2'-fluoroadenosine
  modified_base 17: mod_base = cm
  modified_base 18: mod_base = cm
  modified_base 19: mod_base = OTHER; note = 2'-O-methyladenosine
  modified_base 20: mod_base = gm
  modified_base 20^21: mod_base = OTHER; note = phosphorothioate linkage
  modified_base 21: mod_base = gm
  source 1..21: mol_type = other RNA
acgtaatactccatgaccagg

SEQ ID NO: 742 - RNA, 21 nt, synthetic construct
  modified_base 1: mod_base = OTHER; note = 2'-O-methyladenosine
  modified_base 1^2: mod_base = OTHER; note = phosphorothioate linkage
  modified_base 2: mod_base = OTHER; note = 2'-fluorocytidine
  modified_base 2^3: mod_base = OTHER; note = phosphorothioate linkage
  modified_base 3: mod_base = OTHER; note = 2'-fluoroguanosine
  modified_base 3^4: mod_base = OTHER; note = phosphorothioate linkage
  modified_base 4: mod_base = um
  modified_base 5: mod_base = OTHER; note = 2'-fluoroadenosine
  modified_base 6: mod_base = OTHER; note = 2'-O-methyladenosine
  modified_base 7: mod_base = OTHER; note = 2'-fluorouridine
  modified_base 8: mod_base = OTHER; note = 2'-O-methyladenosine
  modified_base 9: mod_base = cm
  modified_base 10: mod_base = um
  modified_base 11: mod_base = cm
  modified_base 12: mod_base = OTHER; note = 2'-fluorocytidine
  modified_base 13: mod_base = OTHER; note = 2'-O-methyladenosine
  modified_base 14: mod_base = OTHER; note = 2'-fluorouridine
  modified_base 15: mod_base = gm
  modified_base 16: mod_base = OTHER; note = 2'-fluoroadenosine
  modified_base 17: mod_base = cm
  modified_base 18: mod_base = cm
  modified_base 19: mod_base = OTHER; note = 2'-O-methyladenosine
  modified_base 20: mod_base = gm
  modified_base 20^21: mod_base = OTHER; note = phosphorothioate linkage
  modified_base 21: mod_base = gm
  source 1..21: mol_type = other RNA
acgtaatactccatgaccagg

SEQ ID NO: 743 - RNA, 21 nt, synthetic construct
  modified_base 1: mod_base = OTHER; note = 2'-O-methyladenosine
  modified_base 1^2: mod_base = OTHER; note = phosphorothioate linkage
  modified_base 2: mod_base = OTHER; note = 2'-fluorocytidine
  modified_base 2^3: mod_base = OTHER; note = phosphorothioate linkage
  modified_base 3: mod_base = OTHER; note = 2'-fluoroguanosine
  modified_base 3^4: mod_base = OTHER; note = phosphorothioate linkage
  modified_base 4: mod_base = um
  modified_base 5: mod_base = OTHER; note = 2'-fluoroadenosine
  modified_base 6: mod_base = OTHER; note = 2'-O-methyladenosine
  modified_base 7: mod_base = um
  modified_base 8: mod_base = OTHER; note = 2'-O-methyladenosine
  modified_base 9: mod_base = cm
  modified_base 10: mod_base = OTHER; note = 2'-fluorouridine
  modified_base 11: mod_base = cm
  modified_base 12: mod_base = OTHER; note = 2'-fluorocytidine
  modified_base 13: mod_base = OTHER; note = 2'-O-methyladenosine
  modified_base 14: mod_base = OTHER; note = 2'-fluorouridine
  modified_base 15: mod_base = gm
  modified_base 16: mod_base = OTHER; note = 2'-fluoroadenosine
  modified_base 17: mod_base = cm
  modified_base 18: mod_base = cm
  modified_base 19: mod_base = OTHER; note = 2'-O-methyladenosine
  modified_base 20: mod_base = gm
  modified_base 20^21: mod_base = OTHER; note = phosphorothioate linkage
  modified_base 21: mod_base = gm
  source 1..21: mol_type = other RNA
acgtaatactccatgaccagg

SEQ ID NO: 744 - RNA, 21 nt, synthetic construct
  modified_base 1: mod_base = OTHER; note = 2'-O-methyladenosine
  modified_base 1^2: mod_base = OTHER; note = phosphorothioate linkage
  modified_base 2: mod_base = OTHER; note = 2'-fluorocytidine
  modified_base 2^3: mod_base = OTHER; note = phosphorothioate linkage
  modified_base 3: mod_base = OTHER; note = 2'-fluoroguanosine
  modified_base 3^4: mod_base = OTHER; note = phosphorothioate linkage
  modified_base 4: mod_base = um
  modified_base 5: mod_base = OTHER; note = 2'-O-methyladenosine
  modified_base 6: mod_base = OTHER; note = 2'-fluoroadenosine
  modified_base 7: mod_base = OTHER; note = 2'-fluorouridine
  modified_base 8: mod_base = OTHER; note = 2'-O-methyladenosine
  modified_base 9: mod_base = cm
  modified_base 10: mod_base = um
  modified_base 11: mod_base = cm
  modified_base 12: mod_base = OTHER; note = 2'-fluorocytidine
  modified_base 13: mod_base = OTHER; note = 2'-O-methyladenosine
  modified_base 14: mod_base = OTHER; note = 2'-fluorouridine
  modified_base 15: mod_base = gm
  modified_base 16: mod_base = OTHER; note = 2'-fluoroadenosine
  modified_base 17: mod_base = cm
  modified_base 18: mod_base = cm
  modified_base 19: mod_base = OTHER; note = 2'-O-methyladenosine
  modified_base 20: mod_base = gm
  modified_base 20^21: mod_base = OTHER; note = phosphorothioate linkage
  modified_base 21: mod_base = gm
  source 1..21: mol_type = other RNA
acgtaatactccatgaccagg

SEQ ID NO: 745 - RNA, 21 nt, synthetic construct
  modified_base 1: mod_base = um
  modified_base 1^2: mod_base = OTHER; note = phosphorothioate linkage
  modified_base 2: mod_base = OTHER; note = 2'-fluorouridine
  modified_base 2^3: mod_base = OTHER; note = phosphorothioate linkage
  modified_base 3: mod_base = cm
  modified_base 4: mod_base = gm
  modified_base 5: mod_base = OTHER; note = 2'-O-methyladenosine
  modified_base 6: mod_base = OTHER; note = 2'-fluoroadenosine
  modified_base 7: mod_base = gm
  modified_base 8: mod_base = OTHER; note = 2'-O-methyladenosine
  modified_base 9: mod_base = cm
  modified_base 10: mod_base = OTHER; note = 2'-O-methyladenosine
  modified_base 11: mod_base = gm
  modified_base 12: mod_base = um
  modified_base 13: mod_base = um
  modified_base 14: mod_base = OTHER; note = 2'-fluorocytidine
  modified_base 15: mod_base = um
  modified_base 16: mod_base = OTHER; note = 2'-fluoroadenosine
  modified_base 17: mod_base = gm
  modified_base 18: mod_base = gm
  modified_base 19: mod_base = gm
  modified_base 19^20: mod_base = OTHER; note = phosphorothioate linkage
  modified_base 20: mod_base = um
  modified_base 20^21: mod_base = OTHER; note = phosphorothioate linkage
  modified_base 21: mod_base = um
  source 1..21: mol_type = other RNA
ttcgaagacagttctagggtt

SEQ ID NO: 746 - RNA, 21 nt, synthetic construct
  modified_base 1: mod_base = OTHER; note = 5 -cyclopropyl phosphonate-2 -O-methyluridine
  modified_base 1^2: mod_base = OTHER; note = phosphorothioate linkage
  modified_base 2: mod_base = OTHER; note = 2'-fluorouridine
  modified_base 2^3: mod_base = OTHER; note = phosphorothioate linkage
  modified_base 3: mod_base = cm
  modified_base 4: mod_base = gm
  modified_base 5: mod_base = OTHER; note = 2'-O-methyladenosine
  modified_base 6: mod_base = OTHER; note = 2'-fluoroadenosine
  modified_base 7: mod_base = gm
  modified_base 8: mod_base = OTHER; note = 2'-O-methyladenosine
  modified_base 9: mod_base = cm
  modified_base 10: mod_base = OTHER; note = 2'-O-methyladenosine
  modified_base 11: mod_base = gm
  modified_base 12: mod_base = um
  modified_base 13: mod_base = um
  modified_base 14: mod_base = OTHER; note = 2'-fluorocytidine
  modified_base 15: mod_base = um
  modified_base 16: mod_base = OTHER; note = 2'-fluoroadenosine
  modified_base 17: mod_base = gm
  modified_base 18: mod_base = gm
  modified_base 19: mod_base = gm
  modified_base 19^20: mod_base = OTHER; note = phosphorothioate linkage
  modified_base 20: mod_base = um
  modified_base 20^21: mod_base = OTHER; note = phosphorothioate linkage
  modified_base 21: mod_base = um
  source 1..21: mol_type = other RNA
ttcgaagacagttctagggtt

SEQ ID NO: 747 - RNA, 21 nt, synthetic construct
  modified_base 1: mod_base = um
  modified_base 1^2: mod_base = OTHER; note = phosphorothioate linkage
  modified_base 2: mod_base = OTHER; note = 2'-fluoroadenosine
  modified_base 2^3: mod_base = OTHER; note = phosphorothioate linkage
  modified_base 3: mod_base = gm
  modified_base 4: mod_base = OTHER; note = 2'-O-methyladenosine
  modified_base 5: mod_base = cm
  modified_base 6: mod_base = OTHER; note = 2'-O-methyladenosine
  modified_base 7: mod_base = OTHER; note = 2'-O-methyladenosine
  modified_base 8: mod_base = um
  modified_base 9: mod_base = OTHER; note = 2'-O-methyladenosine
  modified_base 10: mod_base = OTHER; note = 2'-fluoroadenosine
  modified_base 11: mod_base = OTHER; note = 2'-O-methyladenosine
  modified_base 12: mod_base = OTHER; note = 2'-fluorouridine
  modified_base 13: mod_base = OTHER; note = 2'-O-methyladenosine
  modified_base 14: mod_base = OTHER; note = 2'-fluorocytidine
  modified_base 15: mod_base = cm
  modified_base 16: mod_base = OTHER; note = 2'-fluoroguanosine
  modified_base 17: mod_base = OTHER; note = 2'-O-methyladenosine
  modified_base 18: mod_base = gm
  modified_base 19: mod_base = gm
  modified_base 20: mod_base = OTHER; note = 2'-O-methyladenosine
  modified_base 20^21: mod_base = OTHER; note = phosphorothioate linkage
  modified_base 21: mod_base = OTHER; note = 2'-O-methyladenosine
  source 1..21: mol_type = other RNA
tagacaataaataccgaggaa

SEQ ID NO: 748 - RNA, 21 nt, synthetic construct
  modified_base 1: mod_base = um
  modified_base 1^2: mod_base = OTHER; note = phosphorothioate linkage
  modified_base 2: mod_base = OTHER; note = 2'-fluorocytidine
  modified_base 2^3: mod_base = OTHER; note = phosphorothioate linkage
  modified_base 3: mod_base = OTHER; note = 2'-fluoroguanosine
  modified_base 3^4: mod_base = OTHER; note = phosphorothioate linkage
  modified_base 4: mod_base = OTHER; note = 2'-O-methyladenosine
  modified_base 5: mod_base = OTHER; note = 2'-O-methyladenosine
  modified_base 6: mod_base = gm
  modified_base 7: mod_base = um
  modified_base 8: mod_base = um
  modified_base 9: mod_base = gm
  modified_base 10: mod_base = cm
  modified_base 11: mod_base = OTHER; note = 2'-O-methyladenosine
  modified_base 12: mod_base = OTHER; note = 2'-fluorouridine
  modified_base 13: mod_base = gm
  modified_base 14: mod_base = OTHER; note = 2'-fluorouridine
  modified_base 15: mod_base = gm
  modified_base 16: mod_base = OTHER; note = 2'-fluorouridine
  modified_base 17: mod_base = cm
  modified_base 18: mod_base = gm
  modified_base 19: mod_base = gm
  modified_base 20: mod_base = um
  modified_base 20^21: mod_base = OTHER; note = phosphorothioate linkage
  modified_base 21: mod_base = gm
  source 1..21: mol_type = other RNA
tcgaagttgcatgtgtcggtg

SEQ ID NO: 749 - RNA, 21 nt, synthetic construct
  modified_base 1: mod_base = um
  modified_base 1^2: mod_base = OTHER; note = phosphorothioate linkage
  modified_base 2: mod_base = OTHER; note = 2'-fluorocytidine
  modified_base 2^3: mod_base = OTHER; note = phosphorothioate linkage
  modified_base 3: mod_base = gm
  modified_base 3^4: mod_base = OTHER; note = phosphorothioate linkage
  modified_base 4: mod_base = OTHER; note = 2'-O-methyladenosine
  modified_base 5: mod_base = OTHER; note = 2'-O-methyladenosine
  modified_base 6: mod_base = gm
  modified_base 7: mod_base = um
  modified_base 8: mod_base = um
  modified_base 9: mod_base = OTHER; note = 2'-fluoroguanosine
  modified_base 10: mod_base = cm
  modified_base 11: mod_base = OTHER; note = 2'-O-methyladenosine
  modified_base 12: mod_base = OTHER; note = 2'-fluorouridine
  modified_base 13: mod_base = gm
  modified_base 14: mod_base = OTHER; note = 2'-fluorouridine
  modified_base 15: mod_base = gm
  modified_base 16: mod_base = OTHER; note = 2'-fluorouridine
  modified_base 17: mod_base = cm
  modified_base 18: mod_base = gm
  modified_base 19: mod_base = gm
  modified_base 20: mod_base = um
  modified_base 20^21: mod_base = OTHER; note = phosphorothioate linkage
  modified_base 21: mod_base = gm
  source 1..21: mol_type = other RNA
tcgaagttgcatgtgtcggtg

SEQ ID NO: 750 - RNA, 21 nt, synthetic construct
  modified_base 1: mod_base = um
  modified_base 1^2: mod_base = OTHER; note = phosphorothioate linkage
  modified_base 2: mod_base = OTHER; note = 2'-fluorocytidine
  modified_base 2^3: mod_base = OTHER; note = phosphorothioate linkage
  modified_base 3: mod_base = OTHER; note = 2'-fluoroguanosine
  modified_base 3^4: mod_base = OTHER; note = phosphorothioate linkage
  modified_base 4: mod_base = OTHER; note = 2'-O-methyladenosine
  modified_base 5: mod_base = OTHER; note = 2'-fluoroadenosine
  modified_base 6: mod_base = gm
  modified_base 7: mod_base = OTHER; note = 2'-fluorouridine
  modified_base 8: mod_base = um
  modified_base 9: mod_base = gm
  modified_base 10: mod_base = cm
  modified_base 11: mod_base = OTHER; note = 2'-O-methyladenosine
  modified_base 12: mod_base = OTHER; note = 2'-fluorouridine
  modified_base 13: mod_base = gm
  modified_base 14: mod_base = OTHER; note = 2'-fluorouridine
  modified_base 15: mod_base = gm
  modified_base 16: mod_base = OTHER; note = 2'-fluorouridine
  modified_base 17: mod_base = cm
  modified_base 18: mod_base = gm
  modified_base 19: mod_base = gm
  modified_base 20: mod_base = um
  modified_base 20^21: mod_base = OTHER; note = phosphorothioate linkage
  modified_base 21: mod_base = gm
  source 1..21: mol_type = other RNA
tcgaagttgcatgtgtcggtg

SEQ ID NO: 751 - RNA, 21 nt, synthetic construct
  modified_base 1: mod_base = OTHER; note = 5 -cyclopropyl phosphonate-2 -O-methyluridine
  modified_base 1^2: mod_base = OTHER; note = phosphorothioate linkage
  modified_base 2: mod_base = OTHER; note = 2'-fluorouridine
  modified_base 2^3: mod_base = OTHER; note = phosphorothioate linkage
  modified_base 3: mod_base = cm
  modified_base 3^4: mod_base = OTHER; note = phosphorothioate linkage
  modified_base 4: mod_base = OTHER; note = 2'-fluoroguanosine
  modified_base 5: mod_base = OTHER; note = 2'-O-methyladenosine
  modified_base 6: mod_base = OTHER; note = 2'-fluoroadenosine
  modified_base 7: mod_base = gm
  modified_base 8: mod_base = OTHER; note = 2'-fluoroadenosine
  modified_base 9: mod_base = cm
  modified_base 10: mod_base = OTHER; note = 2'-fluoroadenosine
  modified_base 11: mod_base = gm
  modified_base 12: mod_base = OTHER; note = 2'-fluorouridine
  modified_base 13: mod_base = um
  modified_base 14: mod_base = OTHER; note = 2'-fluorocytidine
  modified_base 15: mod_base = um
  modified_base 16: mod_base = OTHER; note = 2'-fluoroadenosine
  modified_base 17: mod_base = gm
  modified_base 18: mod_base = OTHER; note = 2'-fluoroguanosine
  modified_base 19: mod_base = gm
  modified_base 20: mod_base = OTHER; note = 2'-fluorouridine
  modified_base 20^21: mod_base = OTHER; note = phosphorothioate linkage
  modified_base 21: mod_base = cm
  source 1..21: mol_type = other RNA
ttcgaagacagttctagggtc

SEQ ID NO: 752 - RNA, 21 nt, synthetic construct
  modified_base 1: mod_base = OTHER; note = 5 -cyclopropyl phosphonate-2 -O-methyluridine
  modified_base 1^2: mod_base = OTHER; note = phosphorothioate linkage
  modified_base 2: mod_base = OTHER; note = 2'-fluorocytidine
  modified_base 2^3: mod_base = OTHER; note = phosphorothioate linkage
  modified_base 3: mod_base = gm
  modified_base 3^4: mod_base = OTHER; note = phosphorothioate linkage
  modified_base 4: mod_base = OTHER; note = 2'-fluoroadenosine
  modified_base 5: mod_base = OTHER; note = 2'-O-methyladenosine
  modified_base 6: mod_base = OTHER; note = 2'-fluoroguanosine
  modified_base 7: mod_base = OTHER; note = 2'-O-methyladenosine
  modified_base 8: mod_base = OTHER; note = 2'-fluorocytidine
  modified_base 9: mod_base = OTHER; note = 2'-O-methyladenosine
  modified_base 10: mod_base = OTHER; note = 2'-fluoroguanosine
  modified_base 11: mod_base = um
  modified_base 12: mod_base = OTHER; note = 2'-fluorouridine
  modified_base 13: mod_base = cm
  modified_base 14: mod_base = OTHER; note = 2'-fluorouridine
  modified_base 15: mod_base = OTHER; note = 2'-O-methyladenosine
  modified_base 16: mod_base = OTHER; note = 2'-fluoroguanosine
  modified_base 17: mod_base = gm
  modified_base 18: mod_base = OTHER; note = 2'-fluoroguanosine
  modified_base 19: mod_base = um
  modified_base 20: mod_base = OTHER; note = 2'-fluorouridine
  modified_base 20^21: mod_base = OTHER; note = phosphorothioate linkage
  modified_base 21: mod_base = cm
  source 1..21: mol_type = other RNA
tcgaagacagttctagggttc

SEQ ID NO: 753 - RNA, 21 nt, synthetic construct
  modified_base 1: mod_base = um
  modified_base 1^2: mod_base = OTHER; note = phosphorothioate linkage
  modified_base 2: mod_base = OTHER; note = 2'-fluorouridine
  modified_base 2^3: mod_base = OTHER; note = phosphorothioate linkage
  modified_base 3: mod_base = gm
  modified_base 3^4: mod_base = OTHER; note = phosphorothioate linkage
  modified_base 4: mod_base = um
  modified_base 5: mod_base = OTHER; note = 2'-O-methyladenosine
  modified_base 6: mod_base = gm
  modified_base 7: mod_base = OTHER; note = 2'-fluorouridine
  modified_base 8: mod_base = gm
  modified_base 9: mod_base = gm
  modified_base 10: mod_base = OTHER; note = 2'-O-methyladenosine
  modified_base 11: mod_base = cm
  modified_base 12: mod_base = OTHER; note = 2'-fluoroguanosine
  modified_base 13: mod_base = OTHER; note = 2'-O-methyladenosine
  modified_base 14: mod_base = OTHER; note = 2'-fluorouridine
  modified_base 15: mod_base = cm
  modified_base 16: mod_base = OTHER; note = 2'-fluorouridine
  modified_base 17: mod_base = um
  modified_base 18: mod_base = gm
  modified_base 19: mod_base = cm
  modified_base 20: mod_base = cm
  modified_base 20^21: mod_base = OTHER; note = phosphorothioate linkage
  modified_base 21: mod_base = OTHER; note = 2'-O-methyladenosine
  source 1..21: mol_type = other RNA
ttgtagtggacgatcttgcca

SEQ ID NO: 754 - RNA, 21 nt, synthetic construct
  modified_base 1: mod_base = um
  modified_base 1^2: mod_base = OTHER; note = phosphorothioate linkage
  modified_base 2: mod_base = OTHER; note = 2'-fluorouridine
  modified_base 2^3: mod_base = OTHER; note = phosphorothioate linkage
  modified_base 3: mod_base = gm
  modified_base 3^4: mod_base = OTHER; note = phosphorothioate linkage
  modified_base 4: mod_base = um
  modified_base 5: mod_base = OTHER; note = 2'-O-methyladenosine
  modified_base 6: mod_base = gm
  modified_base 7: mod_base = um
  modified_base 8: mod_base = gm
  modified_base 9: mod_base = OTHER; note = 2'-fluoroguanosine
  modified_base 10: mod_base = OTHER; note = 2'-O-methyladenosine
  modified_base 11: mod_base = cm
  modified_base 12: mod_base = OTHER; note = 2'-fluoroguanosine
  modified_base 13: mod_base = OTHER; note = 2'-O-methyladenosine
  modified_base 14: mod_base = OTHER; note = 2'-fluorouridine
  modified_base 15: mod_base = cm
  modified_base 16: mod_base = OTHER; note = 2'-fluorouridine
  modified_base 17: mod_base = um
  modified_base 18: mod_base = gm
  modified_base 19: mod_base = cm
  modified_base 20: mod_base = cm
  modified_base 20^21: mod_base = OTHER; note = phosphorothioate linkage
  modified_base 21: mod_base = OTHER; note = 2'-O-methyladenosine
  source 1..21: mol_type = other RNA
ttgtagtggacgatcttgcca

SEQ ID NO: 755 - RNA, 21 nt, synthetic construct
  modified_base 1: mod_base = um
  modified_base 1^2: mod_base = OTHER; note = phosphorothioate linkage
  modified_base 2: mod_base = OTHER; note = 2'-fluorouridine
  modified_base 2^3: mod_base = OTHER; note = phosphorothioate linkage
  modified_base 3: mod_base = gm
  modified_base 4: mod_base = um
  modified_base 5: mod_base = OTHER; note = 2'-fluoroadenosine
  modified_base 6: mod_base = gm
  modified_base 7: mod_base = um
  modified_base 8: mod_base = gm
  modified_base 9: mod_base = gm
  modified_base 10: mod_base = OTHER; note = 2'-O-methyladenosine
  modified_base 11: mod_base = cm
  modified_base 12: mod_base = OTHER; note = 2'-fluoroguanosine
  modified_base 13: mod_base = OTHER; note = 2'-O-methyladenosine
  modified_base 14: mod_base = OTHER; note = 2'-fluorouridine
  modified_base 15: mod_base = cm
  modified_base 16: mod_base = OTHER; note = 2'-fluorouridine
  modified_base 17: mod_base = um
  modified_base 18: mod_base = gm
  modified_base 19: mod_base = cm
  modified_base 19^20: mod_base = OTHER; note = phosphorothioate linkage
  modified_base 20: mod_base = cm
  modified_base 20^21: mod_base = OTHER; note = phosphorothioate linkage
  modified_base 21: mod_base = OTHER; note = 2'-O-methyladenosine
  source 1..21: mol_type = other RNA
ttgtagtggacgatcttgcca

SEQ ID NO: 756 - RNA, 21 nt, synthetic construct
  modified_base 1: mod_base = um
  modified_base 1^2: mod_base = OTHER; note = phosphorothioate linkage
  modified_base 2: mod_base = OTHER; note = 2'-fluorouridine
  modified_base 2^3: mod_base = OTHER; note = phosphorothioate linkage
  modified_base 3: mod_base = gm
  modified_base 4: mod_base = um
  modified_base 5: mod_base = OTHER; note = 2'-fluoroadenosine
  modified_base 6: mod_base = gm
  modified_base 7: mod_base = um
  modified_base 8: mod_base = gm
  modified_base 9: mod_base = gm
  modified_base 10: mod_base = OTHER; note = 2'-O-methyladenosine
  modified_base 11: mod_base = cm
  modified_base 12: mod_base = OTHER; note = 2'-fluoroguanosine
  modified_base 13: mod_base = OTHER; note = 2'-O-methyladenosine
  modified_base 14: mod_base = OTHER; note = 2'-fluorouridine
  modified_base 15: mod_base = cm
  modified_base 16: mod_base = OTHER; note = 2'-fluorouridine
  modified_base 17: mod_base = um
  modified_base 18: mod_base = gm
  modified_base 19: mod_base = cm
  modified_base 20: mod_base = cm
  modified_base 20^21: mod_base = OTHER; note = phosphorothioate linkage
  modified_base 21: mod_base = OTHER; note = 2'-O-methyladenosine
  source 1..21: mol_type = other RNA
ttgtagtggacgatcttgcca

SEQ ID NO: 757 - RNA, 21 nt, synthetic construct
  modified_base 1: mod_base = OTHER; note = 5 -cyclopropyl phosphonate-2 -O-methyluridine
  modified_base 1^2: mod_base = OTHER; note = phosphorothioate linkage
  modified_base 2: mod_base = OTHER; note = 2'-fluorocytidine
  modified_base 2^3: mod_base = OTHER; note = phosphorothioate linkage
  modified_base 3: mod_base = OTHER; note = 2'-fluoroguanosine
  modified_base 4: mod_base = um
  modified_base 5: mod_base = OTHER; note = 2'-fluoroadenosine
  modified_base 6: mod_base = OTHER; note = 2'-O-methyladenosine
  modified_base 7: mod_base = um
  modified_base 8: mod_base = OTHER; note = 2'-O-methyladenosine
  modified_base 9: mod_base = cm
  modified_base 10: mod_base = OTHER; note = 2'-fluorouridine
  modified_base 11: mod_base = cm
  modified_base 12: mod_base = OTHER; note = 2'-fluorocytidine
  modified_base 13: mod_base = OTHER; note = 2'-O-methyladenosine
  modified_base 14: mod_base = OTHER; note = 2'-fluorouridine
  modified_base 15: mod_base = gm
  modified_base 16: mod_base = OTHER; note = 2'-fluoroadenosine
  modified_base 17: mod_base = cm
  modified_base 18: mod_base = cm
  modified_base 19: mod_base = OTHER; note = 2'-O-methyladenosine
  modified_base 20: mod_base = gm
  modified_base 20^21: mod_base = OTHER; note = phosphorothioate linkage
  modified_base 21: mod_base = gm
  source 1..21: mol_type = other RNA
tcgtaatactccatgaccagg

SEQ ID NO: 758 - RNA, 21 nt, synthetic construct
  modified_base 1: mod_base = OTHER; note = 5 -cyclopropyl phosphonate-2 -O-methyluridine
  modified_base 1^2: mod_base = OTHER; note = phosphorothioate linkage
  modified_base 2: mod_base = OTHER; note = 2'-fluorocytidine
  modified_base 2^3: mod_base = OTHER; note = phosphorothioate linkage
  modified_base 3: mod_base = gm
  modified_base 3^4: mod_base = OTHER; note = phosphorothioate linkage
  modified_base 4: mod_base = OTHER; note = 2'-O-methyladenosine
  modified_base 5: mod_base = OTHER; note = 2'-O-methyladenosine
  modified_base 6: mod_base = gm
  modified_base 7: mod_base = OTHER; note = 2'-fluorouridine
  modified_base 8: mod_base = um
  modified_base 9: mod_base = gm
  modified_base 10: mod_base = cm
  modified_base 11: mod_base = OTHER; note = 2'-O-methyladenosine
  modified_base 12: mod_base = OTHER; note = 2'-fluorouridine
  modified_base 13: mod_base = gm
  modified_base 14: mod_base = OTHER; note = 2'-fluorouridine
  modified_base 15: mod_base = gm
  modified_base 16: mod_base = OTHER; note = 2'-fluorouridine
  modified_base 17: mod_base = cm
  modified_base 18: mod_base = gm
  modified_base 19: mod_base = gm
  modified_base 20: mod_base = um
  modified_base 20^21: mod_base = OTHER; note = phosphorothioate linkage
  modified_base 21: mod_base = gm
  source 1..21: mol_type = other RNA
tcgaagttgcatgtgtcggtg

SEQ ID NO: 759 - RNA, 21 nt, synthetic construct
  modified_base 1: mod_base = OTHER; note = 5 -cyclopropyl phosphonate-2 -O-methyluridine
  modified_base 1^2: mod_base = OTHER; note = phosphorothioate linkage
  modified_base 2: mod_base = OTHER; note = 2'-fluorouridine
  modified_base 2^3: mod_base = OTHER; note = phosphorothioate linkage
  modified_base 3: mod_base = gm
  modified_base 3^4: mod_base = OTHER; note = phosphorothioate linkage
  modified_base 4: mod_base = um
  modified_base 5: mod_base = OTHER; note = 2'-fluoroadenosine
  modified_base 6: mod_base = gm
  modified_base 7: mod_base = um
  modified_base 8: mod_base = gm
  modified_base 9: mod_base = gm
  modified_base 10: mod_base = OTHER; note = 2'-O-methyladenosine
  modified_base 11: mod_base = cm
  modified_base 12: mod_base = OTHER; note = 2'-fluoroguanosine
  modified_base 13: mod_base = OTHER; note = 2'-O-methyladenosine
  modified_base 14: mod_base = OTHER; note = 2'-fluorouridine
  modified_base 15: mod_base = cm
  modified_base 16: mod_base = OTHER; note = 2'-fluorouridine
  modified_base 17: mod_base = um
  modified_base 18: mod_base = gm
  modified_base 19: mod_base = cm
  modified_base 20: mod_base = cm
  modified_base 20^21: mod_base = OTHER; note = phosphorothioate linkage
  modified_base 21: mod_base = OTHER; note = 2'-O-methyladenosine
  source 1..21: mol_type = other RNA
ttgtagtggacgatcttgcca

SEQ ID NO: 760 - RNA, 21 nt, synthetic construct
  modified_base 1: mod_base = um
  modified_base 1^2: mod_base = OTHER; note = phosphorothioate linkage
  modified_base 2: mod_base = OTHER; note = 2'-fluorocytidine
  modified_base 2^3: mod_base = OTHER; note = phosphorothioate linkage
  modified_base 3: mod_base = OTHER; note = 2'-fluoroguanosine
  modified_base 4: mod_base = um
  modified_base 5: mod_base = OTHER; note = 2'-fluoroadenosine
  modified_base 6: mod_base = OTHER; note = 2'-O-methyladenosine
  modified_base 7: mod_base = um
  modified_base 8: mod_base = OTHER; note = 2'-O-methyladenosine
  modified_base 9: mod_base = cm
  modified_base 10: mod_base = OTHER; note = 2'-fluorouridine
  modified_base 11: mod_base = cm
  modified_base 12: mod_base = OTHER; note = 2'-fluorocytidine
  modified_base 13: mod_base = OTHER; note = 2'-O-methyladenosine
  modified_base 14: mod_base = OTHER; note = 2'-fluorouridine
  modified_base 15: mod_base = gm
  modified_base 16: mod_base = OTHER; note = 2'-fluoroadenosine
  modified_base 17: mod_base = cm
  modified_base 18: mod_base = cm
  modified_base 19: mod_base = OTHER; note = 2'-O-methyladenosine
  modified_base 20: mod_base = gm
  modified_base 20^21: mod_base = OTHER; note = phosphorothioate linkage
  modified_base 21: mod_base = gm
  source 1..21: mol_type = other RNA
tcgtaatactccatgaccagg

SEQ ID NO: 761 - RNA, 21 nt, synthetic construct
  modified_base 1: mod_base = OTHER; note = 5 -cyclopropyl phosphonate-2 -O-methyluridine
  modified_base 1^2: mod_base = OTHER; note = phosphorothioate linkage
  modified_base 2: mod_base = OTHER; note = 2'-fluoroadenosine
  modified_base 2^3: mod_base = OTHER; note = phosphorothioate linkage
  modified_base 3: mod_base = cm
  modified_base 3^4: mod_base = OTHER; note = phosphorothioate linkage
  modified_base 4: mod_base = OTHER; note = 2'-O-methyladenosine
  modified_base 5: mod_base = gm
  modified_base 6: mod_base = OTHER; note = 2'-O-methyladenosine
  modified_base 7: mod_base = OTHER; note = 2'-fluorocytidine
  modified_base 8: mod_base = OTHER; note = 2'-O-methyladenosine
  modified_base 9: mod_base = OTHER; note = 2'-O-methyladenosine
  modified_base 10: mod_base = um
  modified_base 11: mod_base = OTHER; note = 2'-O-methyladenosine
  modified_base 12: mod_base = OTHER; note = 2'-fluoroadenosine
  modified_base 13: mod_base = OTHER; note = 2'-O-methyladenosine
  modified_base 14: mod_base = OTHER; note = 2'-fluorouridine
  modified_base 15: mod_base = OTHER; note = 2'-O-methyladenosine
  modified_base 16: mod_base = OTHER; note = 2'-fluorocytidine
  modified_base 17: mod_base = cm
  modified_base 18: mod_base = gm
  modified_base 19: mod_base = OTHER; note = 2'-O-methyladenosine
  modified_base 20: mod_base = gm
  modified_base 20^21: mod_base = OTHER; note = phosphorothioate linkage
  modified_base 21: mod_base = gm
  source 1..21: mol_type = other RNA
tacagacaataaataccgagg

SEQ ID NO: 762 - RNA, 21 nt, synthetic construct
  modified_base 1: mod_base = OTHER; note = 5 -cyclopropyl phosphonate-2 -O-methyluridine
  modified_base 1^2: mod_base = OTHER; note = phosphorothioate linkage
  modified_base 2: mod_base = OTHER; note = 2'-fluoroadenosine
  modified_base 2^3: mod_base = OTHER; note = phosphorothioate linkage
  modified_base 3: mod_base = cm
  modified_base 4: mod_base = OTHER; note = 2'-O-methyladenosine
  modified_base 5: mod_base = gm
  modified_base 6: mod_base = OTHER; note = 2'-O-methyladenosine
  modified_base 7: mod_base = OTHER; note = 2'-fluorocytidine
  modified_base 8: mod_base = OTHER; note = 2'-O-methyladenosine
  modified_base 9: mod_base = OTHER; note = 2'-O-methyladenosine
  modified_base 10: mod_base = um
  modified_base 11: mod_base = OTHER; note = 2'-O-methyladenosine
  modified_base 12: mod_base = OTHER; note = 2'-fluoroadenosine
  modified_base 13: mod_base = OTHER; note = 2'-O-methyladenosine
  modified_base 14: mod_base = OTHER; note = 2'-fluorouridine
  modified_base 15: mod_base = OTHER; note = 2'-O-methyladenosine
  modified_base 16: mod_base = OTHER; note = 2'-fluorocytidine
  modified_base 17: mod_base = cm
  modified_base 18: mod_base = gm
  modified_base 19: mod_base = OTHER; note = 2'-O-methyladenosine
  modified_base 20: mod_base = gm
  modified_base 20^21: mod_base = OTHER; note = phosphorothioate linkage
  modified_base 21: mod_base = gm
  source 1..21: mol_type = other RNA
tacagacaataaataccgagg

SEQ ID NO: 763 - RNA, 21 nt, synthetic construct
  modified_base 1: mod_base = OTHER; note = 5 -cyclopropyl phosphonate-2 -O-methyluridine
  modified_base 1^2: mod_base = OTHER; note = phosphorothioate linkage
  modified_base 2: mod_base = OTHER; note = 2'-fluoroadenosine
  modified_base 2^3: mod_base = OTHER; note = phosphorothioate linkage
  modified_base 3: mod_base = cm
  modified_base 3^4: mod_base = OTHER; note = phosphorothioate linkage
  modified_base 4: mod_base = OTHER; note = 2'-O-methyladenosine
  modified_base 5: mod_base = OTHER; note = 2'-fluoroguanosine
  modified_base 6: mod_base = OTHER; note = 2'-O-methyladenosine
  modified_base 7: mod_base = cm
  modified_base 8: mod_base = OTHER; note = 2'-O-methyladenosine
  modified_base 9: mod_base = OTHER; note = 2'-O-methyladenosine
  modified_base 10: mod_base = um
  modified_base 11: mod_base = OTHER; note = 2'-O-methyladenosine
  modified_base 12: mod_base = OTHER; note = 2'-fluoroadenosine
  modified_base 13: mod_base = OTHER; note = 2'-O-methyladenosine
  modified_base 14: mod_base = OTHER; note = 2'-fluorouridine
  modified_base 15: mod_base = OTHER; note = 2'-O-methyladenosine
  modified_base 16: mod_base = OTHER; note = 2'-fluorocytidine
  modified_base 17: mod_base = cm
  modified_base 18: mod_base = gm
  modified_base 19: mod_base = OTHER; note = 2'-O-methyladenosine
  modified_base 20: mod_base = gm
  modified_base 20^21: mod_base = OTHER; note = phosphorothioate linkage
  modified_base 21: mod_base = gm
  source 1..21: mol_type = other RNA
tacagacaataaataccgagg

SEQ ID NO: 764 - RNA, 21 nt, synthetic construct
  modified_base 1: mod_base = OTHER; note = 5 -cyclopropyl phosphonate-2 -O-methyluridine
  modified_base 1^2: mod_base = OTHER; note = phosphorothioate linkage
  modified_base 2: mod_base = OTHER; note = 2'-fluoroadenosine
  modified_base 2^3: mod_base = OTHER; note = phosphorothioate linkage
  modified_base 3: mod_base = cm
  modified_base 4: mod_base = OTHER; note = 2'-O-methyladenosine
  modified_base 5: mod_base = gm
  modified_base 6: mod_base = OTHER; note = 2'-O-methyladenosine
  modified_base 7: mod_base = cm
  modified_base 8: mod_base = OTHER; note = 2'-O-methyladenosine
  modified_base 9: mod_base = OTHER; note = 2'-O-methyladenosine
  modified_base 10: mod_base = OTHER; note = 2'-fluorouridine
  modified_base 11: mod_base = OTHER; note = 2'-O-methyladenosine
  modified_base 12: mod_base = OTHER; note = 2'-fluoroadenosine
  modified_base 13: mod_base = OTHER; note = 2'-O-methyladenosine
  modified_base 14: mod_base = OTHER; note = 2'-fluorouridine
  modified_base 15: mod_base = OTHER; note = 2'-O-methyladenosine
  modified_base 16: mod_base = OTHER; note = 2'-fluorocytidine
  modified_base 17: mod_base = cm
  modified_base 18: mod_base = gm
  modified_base 19: mod_base = OTHER; note = 2'-O-methyladenosine
  modified_base 20: mod_base = gm
  modified_base 20^21: mod_base = OTHER; note = phosphorothioate linkage
  modified_base 21: mod_base = gm
  source 1..21: mol_type = other RNA
tacagacaataaataccgagg

SEQ ID NO: 765 - RNA, 21 nt, synthetic construct
  modified_base 1: mod_base = OTHER; note = 2 -deoxythymidine
  modified_base 1^2: mod_base = OTHER; note = phosphorodithioate linkage
  modified_base 2: mod_base = OTHER; note = 2'-fluoroadenosine
  modified_base 2^3: mod_base = OTHER; note = phosphorothioate linkage
  modified_base 3: mod_base = gm
  modified_base 4: mod_base = OTHER; note = 2'-O-methyladenosine
  modified_base 5: mod_base = cm
  modified_base 6: mod_base = OTHER; note = 2'-O-methyladenosine
  modified_base 7: mod_base = OTHER; note = 2'-O-methyladenosine
  modified_base 8: mod_base = um
  modified_base 9: mod_base = OTHER; note = 2'-O-methyladenosine
  modified_base 10: mod_base = OTHER; note = 2'-fluoroadenosine
  modified_base 11: mod_base = OTHER; note = 2'-O-methyladenosine
  modified_base 12: mod_base = OTHER; note = 2'-fluorouridine
  modified_base 13: mod_base = OTHER; note = 2'-O-methyladenosine
  modified_base 14: mod_base = OTHER; note = 2'-fluorocytidine
  modified_base 15: mod_base = cm
  modified_base 16: mod_base = OTHER; note = 2'-fluoroguanosine
  modified_base 17: mod_base = OTHER; note = 2'-O-methyladenosine
  modified_base 18: mod_base = gm
  modified_base 19: mod_base = gm
  modified_base 20: mod_base = OTHER; note = 2'-O-methyladenosine
  modified_base 20^21: mod_base = OTHER; note = phosphorothioate linkage
  modified_base 21: mod_base = OTHER; note = 2'-O-methyladenosine
  source 1..21: mol_type = other RNA
tagacaataaataccgaggaa

SEQ ID NO: 766 - RNA, 21 nt, synthetic construct
  modified_base 1: mod_base = OTHER; note = uridine
  modified_base 1^2: mod_base = OTHER; note = phosphorothioate linkage
  modified_base 1^2: mod_base = OTHER; note = phosphorothioate linkage
  modified_base 2: mod_base = OTHER; note = 2'-fluoroadenosine
  modified_base 2^3: mod_base = OTHER; note = phosphorothioate linkage
  modified_base 3: mod_base = gm
  modified_base 4: mod_base = OTHER; note = 2'-O-methyladenosine
  modified_base 5: mod_base = cm
  modified_base 6: mod_base = OTHER; note = 2'-O-methyladenosine
  modified_base 7: mod_base = OTHER; note = 2'-O-methyladenosine
  modified_base 8: mod_base = um
  modified_base 9: mod_base = OTHER; note = 2'-O-methyladenosine
  modified_base 10: mod_base = OTHER; note = 2'-fluoroadenosine
  modified_base 11: mod_base = OTHER; note = 2'-O-methyladenosine
  modified_base 12: mod_base = OTHER; note = 2'-fluorouridine
  modified_base 13: mod_base = OTHER; note = 2'-O-methyladenosine
  modified_base 14: mod_base = OTHER; note = 2'-fluorocytidine
  modified_base 15: mod_base = cm
  modified_base 16: mod_base = OTHER; note = 2'-fluoroguanosine
  modified_base 17: mod_base = OTHER; note = 2'-O-methyladenosine
  modified_base 18: mod_base = gm
  modified_base 19: mod_base = gm
  modified_base 20: mod_base = OTHER; note = 2'-O-methyladenosine
  modified_base 20^21: mod_base = OTHER; note = phosphorothioate linkage
  modified_base 21: mod_base = OTHER; note = 2'-O-methyladenosine
  source 1..21: mol_type = other RNA
tagacaataaataccgaggaa

SEQ ID NO: 767 - RNA, 21 nt, synthetic construct
  modified_base 1: mod_base = OTHER; note = 2 -deoxythymidine
  modified_base 1^2: mod_base = OTHER; note = phosphorodithioate linkage
  modified_base 2: mod_base = OTHER; note = 2'-fluoroadenosine
  modified_base 3: mod_base = gm
  modified_base 4: mod_base = OTHER; note = 2'-O-methyladenosine
  modified_base 5: mod_base = cm
  modified_base 6: mod_base = OTHER; note = 2'-O-methyladenosine
  modified_base 7: mod_base = OTHER; note = 2'-O-methyladenosine
  modified_base 8: mod_base = um
  modified_base 9: mod_base = OTHER; note = 2'-O-methyladenosine
  modified_base 10: mod_base = OTHER; note = 2'-fluoroadenosine
  modified_base 11: mod_base = OTHER; note = 2'-O-methyladenosine
  modified_base 12: mod_base = OTHER; note = 2'-fluorouridine
  modified_base 13: mod_base = OTHER; note = 2'-O-methyladenosine
  modified_base 14: mod_base = OTHER; note = 2'-fluorocytidine
  modified_base 15: mod_base = cm
  modified_base 16: mod_base = OTHER; note = 2'-fluoroguanosine
  modified_base 17: mod_base = OTHER; note = 2'-O-methyladenosine
  modified_base 18: mod_base = gm
  modified_base 19: mod_base = gm
  modified_base 20: mod_base = OTHER; note = 2'-O-methyladenosine
  modified_base 20^21: mod_base = OTHER; note = phosphorothioate linkage
  modified_base 21: mod_base = OTHER; note = 2'-O-methyladenosine
  source 1..21: mol_type = other RNA
tagacaataaataccgaggaa

SEQ ID NO: 768 - RNA, 21 nt, synthetic construct
  modified_base 1: mod_base = OTHER; note = 5 -cyclopropyl phosphonate-2 -O-methyluridine
  modified_base 1^2: mod_base = OTHER; note = phosphorothioate linkage
  modified_base 2: mod_base = OTHER; note = 2'-fluorocytidine
  modified_base 2^3: mod_base = OTHER; note = phosphorothioate linkage
  modified_base 3: mod_base = OTHER; note = 2'-fluoroguanosine
  modified_base 4: mod_base = um
  modified_base 5: mod_base = OTHER; note = 2'-fluoroadenosine
  modified_base 6: mod_base = OTHER; note = 2'-O-methyladenosine
  modified_base 7: mod_base = um
  modified_base 8: mod_base = OTHER; note = 2'-O-methyladenosine
  modified_base 9: mod_base = cm
  modified_base 10: mod_base = OTHER; note = 2'-fluorouridine
  modified_base 11: mod_base = cm
  modified_base 12: mod_base = OTHER; note = 2'-fluorocytidine
  modified_base 13: mod_base = OTHER; note = 2'-O-methyladenosine
  modified_base 14: mod_base = OTHER; note = 2'-fluorouridine
  modified_base 15: mod_base = gm
  modified_base 16: mod_base = OTHER; note = 2'-fluoroadenosine
  modified_base 17: mod_base = cm
  modified_base 18: mod_base = cm
  modified_base 19: mod_base = OTHER; note = 2'-O-methyladenosine
  modified_base 20: mod_base = gm
  modified_base 21: mod_base = gm
  source 1..21: mol_type = other RNA
tcgtaatactccatgaccagg

SEQ ID NO: 769 - RNA, 22 nt, synthetic construct
  modified_base 1: mod_base = OTHER; note = 5 -cyclopropyl phosphonate-2 -O-methyluridine
  modified_base 1^2: mod_base = OTHER; note = phosphorothioate linkage
  modified_base 2: mod_base = OTHER; note = 2'-fluorocytidine
  modified_base 2^3: mod_base = OTHER; note = phosphorothioate linkage
  modified_base 3: mod_base = OTHER; note = 2'-fluoroguanosine
  modified_base 4: mod_base = um
  modified_base 5: mod_base = OTHER; note = 2'-fluoroadenosine
  modified_base 6: mod_base = OTHER; note = 2'-O-methyladenosine
  modified_base 7: mod_base = um
  modified_base 8: mod_base = OTHER; note = 2'-O-methyladenosine
  modified_base 9: mod_base = cm
  modified_base 10: mod_base = OTHER; note = 2'-fluorouridine
  modified_base 11: mod_base = cm
  modified_base 12: mod_base = OTHER; note = 2'-fluorocytidine
  modified_base 13: mod_base = OTHER; note = 2'-O-methyladenosine
  modified_base 14: mod_base = OTHER; note = 2'-fluorouridine
  modified_base 15: mod_base = gm
  modified_base 16: mod_base = gm
  modified_base 17: mod_base = OTHER; note = 2'-fluoroadenosine
  modified_base 18: mod_base = cm
  modified_base 19: mod_base = cm
  modified_base 20: mod_base = OTHER; note = 2'-O-methyladenosine
  modified_base 21: mod_base = gm
  modified_base 21^22: mod_base = OTHER; note = phosphorothioate linkage
  modified_base 22: mod_base = gm
  source 1..22: mol_type = other RNA
tcgtaatactccatggaccagg

SEQ ID NO: 770 - RNA, 20 nt, synthetic construct
  modified_base 1: mod_base = OTHER; note = 2'-fluorocytidine
  modified_base 1^2: mod_base = OTHER; note = phosphorothioate linkage
  modified_base 2: mod_base = OTHER; note = 2'-fluoroguanosine
  modified_base 3: mod_base = um
  modified_base 4: mod_base = OTHER; note = 2'-fluoroadenosine
  modified_base 5: mod_base = OTHER; note = 2'-O-methyladenosine
  modified_base 6: mod_base = um
  modified_base 7: mod_base = OTHER; note = 2'-O-methyladenosine
  modified_base 8: mod_base = cm
  modified_base 9: mod_base = OTHER; note = 2'-fluorouridine
  modified_base 10: mod_base = cm
  modified_base 11: mod_base = OTHER; note = 2'-fluorocytidine
  modified_base 12: mod_base = OTHER; note = 2'-O-methyladenosine
  modified_base 13: mod_base = OTHER; note = 2'-fluorouridine
  modified_base 14: mod_base = gm
  modified_base 15: mod_base = OTHER; note = 2'-fluoroadenosine
  modified_base 16: mod_base = cm
  modified_base 17: mod_base = cm
  modified_base 18: mod_base = OTHER; note = 2'-O-methyladenosine
  modified_base 19: mod_base = gm
  modified_base 19^20: mod_base = OTHER; note = phosphorothioate linkage
  modified_base 20: mod_base = gm
  source 1..20: mol_type = other RNA
cgtaatactccatgaccagg

SEQ ID NO: 771 - RNA, 21 nt, synthetic construct
  modified_base 1: mod_base = OTHER; note = 5 -cyclopropyl phosphonate-2 -O-methyluridine
  modified_base 1^2: mod_base = OTHER; note = phosphorothioate linkage
  modified_base 2: mod_base = OTHER; note = 2'-fluorocytidine
  modified_base 2^3: mod_base = OTHER; note = phosphorothioate linkage
  modified_base 3: mod_base = OTHER; note = 2'-fluoroguanosine
  modified_base 4: mod_base = um
  modified_base 5: mod_base = OTHER; note = 2'-fluoroadenosine
  modified_base 6: mod_base = OTHER; note = 2'-O-methyladenosine
  modified_base 7: mod_base = um
  modified_base 8: mod_base = OTHER; note = 2'-O-methyladenosine
  modified_base 9: mod_base = cm
  modified_base 10: mod_base = OTHER; note = 2'-fluorouridine
  modified_base 11: mod_base = cm
  modified_base 12: mod_base = OTHER; note = 2'-fluorocytidine
  modified_base 13: mod_base = OTHER; note = 2'-O-methyladenosine
  modified_base 14: mod_base = OTHER; note = 2'-fluorouridine
  modified_base 15: mod_base = gm
  modified_base 16: mod_base = OTHER; note = 2'-fluoroadenosine
  modified_base 17: mod_base = cm
  modified_base 18: mod_base = cm
  modified_base 19: mod_base = OTHER; note = 2'-O-methyladenosine
  modified_base 20: mod_base = gm
  modified_base 20^21: mod_base = OTHER; note = phosphorodithioate linkage
  modified_base 21: mod_base = gm
  source 1..21: mol_type = other RNA
tcgtaatactccatgaccagg

SEQ ID NO: 772 - RNA, 21 nt, synthetic construct
  modified_base 1: mod_base = OTHER; note = 5 -cyclopropyl phosphonate-2 -O-methyluridine
  modified_base 1^2: mod_base = OTHER; note = phosphorothioate linkage
  modified_base 2: mod_base = OTHER; note = 2'-fluorocytidine
  modified_base 2^3: mod_base = OTHER; note = phosphorothioate linkage
  modified_base 3: mod_base = OTHER; note = 2'-fluoroguanosine
  modified_base 4: mod_base = um
  modified_base 5: mod_base = OTHER; note = 2'-O-methyladenosine
  modified_base 6: mod_base = OTHER; note = 2'-fluoroadenosine
  modified_base 7: mod_base = um
  modified_base 8: mod_base = OTHER; note = 2'-O-methyladenosine
  modified_base 9: mod_base = cm
  modified_base 10: mod_base = OTHER; note = 2'-fluorouridine
  modified_base 11: mod_base = cm
  modified_base 12: mod_base = OTHER; note = 2'-fluorocytidine
  modified_base 13: mod_base = OTHER; note = 2'-O-methyladenosine
  modified_base 14: mod_base = OTHER; note = 2'-fluorouridine
  modified_base 15: mod_base = gm
  modified_base 16: mod_base = OTHER; note = 2'-fluoroadenosine
  modified_base 17: mod_base = cm
  modified_base 18: mod_base = cm
  modified_base 19: mod_base = OTHER; note = 2'-O-methyladenosine
  modified_base 20: mod_base = gm
  modified_base 20^21: mod_base = OTHER; note = phosphorothioate linkage
  modified_base 21: mod_base = gm
  source 1..21: mol_type = other RNA
tcgtaatactccatgaccagg

SEQ ID NO: 773 - RNA, 21 nt, synthetic construct
  modified_base 1: mod_base = OTHER; note = 5 -cyclopropyl phosphonate-2 -O-methyluridine
  modified_base 1^2: mod_base = OTHER; note = phosphorothioate linkage
  modified_base 2: mod_base = OTHER; note = 2'-fluorocytidine
  modified_base 2^3: mod_base = OTHER; note = phosphorothioate linkage
  modified_base 3: mod_base = OTHER; note = 2'-fluoroguanosine
  modified_base 4: mod_base = um
  modified_base 5: mod_base = OTHER; note = 2'-O-methyladenosine
  modified_base 6: mod_base = OTHER; note = 2'-fluoroadenosine
  modified_base 7: mod_base = um
  modified_base 8: mod_base = OTHER; note = 2'-O-methyladenosine
  modified_base 9: mod_base = cm
  modified_base 10: mod_base = OTHER; note = 2'-fluorouridine
  modified_base 11: mod_base = cm
  modified_base 12: mod_base = OTHER; note = 2'-fluorocytidine
  modified_base 13: mod_base = OTHER; note = 2'-O-methyladenosine
  modified_base 14: mod_base = OTHER; note = 2'-fluorouridine
  modified_base 15: mod_base = gm
  modified_base 16: mod_base = OTHER; note = 2'-fluoroadenosine
  modified_base 17: mod_base = cm
  modified_base 18: mod_base = cm
  modified_base 19: mod_base = OTHER; note = 2'-O-methyladenosine
  modified_base 20: mod_base = gm
  modified_base 20^21: mod_base = OTHER; note = phosphorodithioate linkage
  modified_base 21: mod_base = gm
  source 1..21: mol_type = other RNA
tcgtaatactccatgaccagg

SEQ ID NO: 774 - RNA, 21 nt, synthetic construct
  modified_base 1: mod_base = OTHER; note = 5 -cyclopropyl phosphonate-2 -O-methyluridine
  modified_base 1^2: mod_base = OTHER; note = phosphorothioate linkage
  modified_base 2: mod_base = OTHER; note = 2'-fluorocytidine
  modified_base 2^3: mod_base = OTHER; note = phosphorothioate linkage
  modified_base 3: mod_base = gm
  modified_base 4: mod_base = um
  modified_base 5: mod_base = OTHER; note = 2'-O-methyladenosine
  modified_base 6: mod_base = OTHER; note = 2'-O-methyladenosine
  modified_base 7: mod_base = OTHER; note = 2'-fluorouridine
  modified_base 8: mod_base = OTHER; note = 2'-O-methyladenosine
  modified_base 9: mod_base = cm
  modified_base 10: mod_base = um
  modified_base 11: mod_base = cm
  modified_base 12: mod_base = OTHER; note = 2'-fluorocytidine
  modified_base 13: mod_base = OTHER; note = 2'-O-methyladenosine
  modified_base 14: mod_base = OTHER; note = 2'-fluorouridine
  modified_base 15: mod_base = gm
  modified_base 16: mod_base = OTHER; note = 2'-fluoroadenosine
  modified_base 17: mod_base = cm
  modified_base 18: mod_base = cm
  modified_base 19: mod_base = OTHER; note = 2'-O-methyladenosine
  modified_base 20: mod_base = gm
  modified_base 20^21: mod_base = OTHER; note = phosphorothioate linkage
  modified_base 21: mod_base = gm
  source 1..21: mol_type = other RNA
tcgtaatactccatgaccagg

SEQ ID NO: 775 - RNA, 21 nt, synthetic construct
  modified_base 1: mod_base = OTHER; note = 5 -cyclopropyl phosphonate-2 -O-methyluridine
  modified_base 1^2: mod_base = OTHER; note = phosphorothioate linkage
  modified_base 2: mod_base = OTHER; note = 2'-fluorocytidine
  modified_base 2^3: mod_base = OTHER; note = phosphorothioate linkage
  modified_base 3: mod_base = gm
  modified_base 4: mod_base = um
  modified_base 5: mod_base = OTHER; note = 2'-O-methyladenosine
  modified_base 6: mod_base = OTHER; note = 2'-O-methyladenosine
  modified_base 7: mod_base = OTHER; note = 2'-fluorouridine
  modified_base 8: mod_base = OTHER; note = 2'-O-methyladenosine
  modified_base 9: mod_base = cm
  modified_base 10: mod_base = um
  modified_base 11: mod_base = cm
  modified_base 12: mod_base = OTHER; note = 2'-fluorocytidine
  modified_base 13: mod_base = OTHER; note = 2'-O-methyladenosine
  modified_base 14: mod_base = OTHER; note = 2'-fluorouridine
  modified_base 15: mod_base = gm
  modified_base 16: mod_base = OTHER; note = 2'-fluoroadenosine
  modified_base 17: mod_base = cm
  modified_base 18: mod_base = cm
  modified_base 19: mod_base = OTHER; note = 2'-O-methyladenosine
  modified_base 20: mod_base = gm
  modified_base 20^21: mod_base = OTHER; note = phosphorodithioate linkage
  modified_base 21: mod_base = gm
  source 1..21: mol_type = other RNA
tcgtaatactccatgaccagg

SEQ ID NO: 776 - RNA, 21 nt, synthetic construct
  modified_base 1: mod_base = gm
  modified_base 2: mod_base = gm
  modified_base 3: mod_base = OTHER; note = 2'-O-methyladenosine
  modified_base 4: mod_base = um
  modified_base 5: mod_base = gm
  modified_base 6: mod_base = OTHER; note = 2'-O-methyladenosine
  modified_base 7: mod_base = OTHER; note = 2'-O-methyladenosine
  modified_base 8: mod_base = OTHER; note = 2'-O-methyladenosine
  modified_base 9: mod_base = OTHER; note = 2'-fluorocytidine
  modified_base 10: mod_base = OTHER; note = 2'-fluoroadenosine
  modified_base 11: mod_base = OTHER; note = 2'-fluoroguanosine
  modified_base 12: mod_base = cm
  modified_base 13: mod_base = um
  modified_base 14: mod_base = gm
  modified_base 15: mod_base = OTHER; note = 2'-O-methyladenosine
  modified_base 16: mod_base = OTHER; note = 2'-O-methyladenosine
  modified_base 17: mod_base = gm
  modified_base 18: mod_base = um
  modified_base 19: mod_base = OTHER; note = 2'-O-methylinosine
  modified_base 20: mod_base = gm
  modified_base 21: mod_base = OTHER; note = 2'-O-methyladenosine
  source 1..21: mol_type = other RNA
ggatgaaacagctgaagtnga

SEQ ID NO: 777 - RNA, 21 nt, synthetic construct
  modified_base 1: mod_base = um
  modified_base 2: mod_base = cm
  modified_base 3: mod_base = cm
  modified_base 4: mod_base = cm
  modified_base 5: mod_base = um
  modified_base 6: mod_base = gm
  modified_base 7: mod_base = OTHER; note = 2'-O-methyladenosine
  modified_base 8: mod_base = OTHER; note = 2'-O-methyladenosine
  modified_base 9: mod_base = OTHER; note = 2'-fluorocytidine
  modified_base 10: mod_base = OTHER; note = 2'-fluorocytidine
  modified_base 11: mod_base = OTHER; note = 2'-fluorocytidine
  modified_base 12: mod_base = um
  modified_base 13: mod_base = OTHER; note = 2'-O-methyladenosine
  modified_base 14: mod_base = gm
  modified_base 15: mod_base = OTHER; note = 2'-O-methyladenosine
  modified_base 16: mod_base = OTHER; note = 2'-O-methyladenosine
  modified_base 17: mod_base = cm
  modified_base 18: mod_base = um
  modified_base 19: mod_base = gm
  modified_base 20: mod_base = um
  modified_base 21: mod_base = OTHER; note = 2'-O-methyladenosine
  source 1..21: mol_type = other RNA
tccctgaaccctagaactgta

SEQ ID NO: 778 - RNA, 21 nt, synthetic construct
  modified_base 1: mod_base = gm
  modified_base 2: mod_base = OTHER; note = 2'-O-methyladenosine
  modified_base 3: mod_base = OTHER; note = 2'-O-methyladenosine
  modified_base 4: mod_base = cm
  modified_base 5: mod_base = cm
  modified_base 6: mod_base = cm
  modified_base 7: mod_base = um
  modified_base 8: mod_base = OTHER; note = 2'-O-methyladenosine
  modified_base 9: mod_base = OTHER; note = 2'-fluoroguanosine
  modified_base 10: mod_base = OTHER; note = 2'-fluoroadenosine
  modified_base 11: mod_base = OTHER; note = 2'-fluoroadenosine
  modified_base 12: mod_base = cm
  modified_base 13: mod_base = um
  modified_base 14: mod_base = gm
  modified_base 15: mod_base = um
  modified_base 16: mod_base = cm
  modified_base 17: mod_base = um
  modified_base 18: mod_base = um
  modified_base 19: mod_base = cm
  modified_base 20: mod_base = OTHER; note = 2'-O-methylinosine
  modified_base 21: mod_base = OTHER; note = 2'-O-methyladenosine
  source 1..21: mol_type = other RNA
gaaccctagaactgtcttcna

SEQ ID NO: 779 - RNA, 21 nt, synthetic construct
  modified_base 1: mod_base = gm
  modified_base 2: mod_base = OTHER; note = 2'-O-methyladenosine
  modified_base 3: mod_base = cm
  modified_base 4: mod_base = cm
  modified_base 5: mod_base = cm
  modified_base 6: mod_base = um
  modified_base 7: mod_base = OTHER; note = 2'-O-methyladenosine
  modified_base 8: mod_base = gm
  modified_base 9: mod_base = OTHER; note = 2'-fluoroadenosine
  modified_base 10: mod_base = OTHER; note = 2'-fluoroadenosine
  modified_base 11: mod_base = OTHER; note = 2'-fluorocytidine
  modified_base 12: mod_base = um
  modified_base 13: mod_base = gm
  modified_base 14: mod_base = um
  modified_base 15: mod_base = cm
  modified_base 16: mod_base = um
  modified_base 17: mod_base = um
  modified_base 18: mod_base = cm
  modified_base 19: mod_base = OTHER; note = 2'-O-methylinosine
  modified_base 20: mod_base = OTHER; note = 2'-O-methyladenosine
  modified_base 21: mod_base = OTHER; note = 2'-O-methyladenosine
  source 1..21: mol_type = other RNA
gaccctagaactgtcttcnaa

SEQ ID NO: 780 - RNA, 21 nt, synthetic construct
  modified_base 1: mod_base = OTHER; note = 2'-O-methyladenosine
  modified_base 2: mod_base = cm
  modified_base 3: mod_base = cm
  modified_base 4: mod_base = cm
  modified_base 5: mod_base = um
  modified_base 6: mod_base = OTHER; note = 2'-O-methyladenosine
  modified_base 7: mod_base = gm
  modified_base 8: mod_base = OTHER; note = 2'-O-methyladenosine
  modified_base 9: mod_base = OTHER; note = 2'-fluoroadenosine
  modified_base 10: mod_base = OTHER; note = 2'-fluorocytidine
  modified_base 11: mod_base = OTHER; note = 2'-fluorouridine
  modified_base 12: mod_base = gm
  modified_base 13: mod_base = um
  modified_base 14: mod_base = cm
  modified_base 15: mod_base = um
  modified_base 16: mod_base = um
  modified_base 17: mod_base = cm
  modified_base 18: mod_base = OTHER; note = 2'-O-methylinosine
  modified_base 19: mod_base = OTHER; note = 2'-O-methyladenosine
  modified_base 20: mod_base = cm
  modified_base 21: mod_base = um
  source 1..21: mol_type = other RNA
accctagaactgtcttcnact

SEQ ID NO: 781 - RNA, 21 nt, synthetic construct
  modified_base 1: mod_base = cm
  modified_base 2: mod_base = cm
  modified_base 3: mod_base = cm
  modified_base 4: mod_base = um
  modified_base 5: mod_base = OTHER; note = 2'-O-methyladenosine
  modified_base 6: mod_base = gm
  modified_base 7: mod_base = OTHER; note = 2'-O-methyladenosine
  modified_base 8: mod_base = OTHER; note = 2'-O-methyladenosine
  modified_base 9: mod_base = OTHER; note = 2'-fluorocytidine
  modified_base 10: mod_base = OTHER; note = 2'-fluorouridine
  modified_base 11: mod_base = OTHER; note = 2'-fluoroguanosine
  modified_base 12: mod_base = um
  modified_base 13: mod_base = cm
  modified_base 14: mod_base = um
  modified_base 15: mod_base = um
  modified_base 16: mod_base = cm
  modified_base 17: mod_base = OTHER; note = 2'-O-methylinosine
  modified_base 18: mod_base = OTHER; note = 2'-O-methyladenosine
  modified_base 19: mod_base = cm
  modified_base 20: mod_base = um
  modified_base 21: mod_base = OTHER; note = 2'-O-methyladenosine
  source 1..21: mol_type = other RNA
ccctagaactgtcttcnacta

SEQ ID NO: 782 - RNA, 21 nt, synthetic construct
  modified_base 1: mod_base = um
  modified_base 2: mod_base = gm
  modified_base 3: mod_base = cm
  modified_base 4: mod_base = um
  modified_base 5: mod_base = um
  modified_base 6: mod_base = OTHER; note = 2'-O-methyladenosine
  modified_base 7: mod_base = cm
  modified_base 8: mod_base = um
  modified_base 9: mod_base = OTHER; note = 2'-fluorocytidine
  modified_base 10: mod_base = OTHER; note = 2'-fluoroguanosine
  modified_base 11: mod_base = OTHER; note = 2'-fluoroguanosine
  modified_base 12: mod_base = gm
  modified_base 13: mod_base = OTHER; note = 2'-O-methyladenosine
  modified_base 14: mod_base = OTHER; note = 2'-O-methyladenosine
  modified_base 15: mod_base = OTHER; note = 2'-O-methyladenosine
  modified_base 16: mod_base = um
  modified_base 17: mod_base = um
  modified_base 18: mod_base = um
  modified_base 19: mod_base = gm
  modified_base 20: mod_base = cm
  modified_base 21: mod_base = um
  source 1..21: mol_type = other RNA
tgcttactcgggaaatttgct

SEQ ID NO: 783 - RNA, 21 nt, synthetic construct
  modified_base 1: mod_base = cm
  modified_base 2: mod_base = gm
  modified_base 3: mod_base = gm
  modified_base 4: mod_base = gm
  modified_base 5: mod_base = OTHER; note = 2'-O-methyladenosine
  modified_base 6: mod_base = OTHER; note = 2'-O-methyladenosine
  modified_base 7: mod_base = OTHER; note = 2'-O-methyladenosine
  modified_base 8: mod_base = um
  modified_base 9: mod_base = OTHER; note = 2'-fluorouridine
  modified_base 10: mod_base = OTHER; note = 2'-fluorouridine
  modified_base 11: mod_base = OTHER; note = 2'-fluoroguanosine
  modified_base 12: mod_base = cm
  modified_base 13: mod_base = um
  modified_base 14: mod_base = um
  modified_base 15: mod_base = um
  modified_base 16: mod_base = um
  modified_base 17: mod_base = OTHER; note = 2'-O-methylinosine
  modified_base 18: mod_base = cm
  modified_base 19: mod_base = cm
  modified_base 20: mod_base = OTHER; note = 2'-O-methyladenosine
  modified_base 21: mod_base = OTHER; note = 2'-O-methyladenosine
  source 1..21: mol_type = other RNA
cgggaaatttgcttttnccaa

SEQ ID NO: 784 - RNA, 21 nt, synthetic construct
  modified_base 1: mod_base = OTHER; note = 2'-O-methyladenosine
  modified_base 2: mod_base = cm
  modified_base 3: mod_base = cm
  modified_base 4: mod_base = cm
  modified_base 5: mod_base = cm
  modified_base 6: mod_base = OTHER; note = 2'-O-methyladenosine
  modified_base 7: mod_base = OTHER; note = 2'-O-methyladenosine
  modified_base 8: mod_base = um
  modified_base 9: mod_base = OTHER; note = 2'-fluorocytidine
  modified_base 10: mod_base = OTHER; note = 2'-fluorocytidine
  modified_base 11: mod_base = OTHER; note = 2'-fluoroadenosine
  modified_base 12: mod_base = cm
  modified_base 13: mod_base = gm
  modified_base 14: mod_base = um
  modified_base 15: mod_base = um
  modified_base 16: mod_base = um
  modified_base 17: mod_base = um
  modified_base 18: mod_base = gm
  modified_base 19: mod_base = gm
  modified_base 20: mod_base = OTHER; note = 2'-O-methyladenosine
  modified_base 21: mod_base = um
  source 1..21: mol_type = other RNA
accccaatccacgttttggat

SEQ ID NO: 785 - RNA, 21 nt, synthetic construct
  modified_base 1: mod_base = cm
  modified_base 2: mod_base = cm
  modified_base 3: mod_base = cm
  modified_base 4: mod_base = OTHER; note = 2'-O-methyladenosine
  modified_base 5: mod_base = OTHER; note = 2'-O-methyladenosine
  modified_base 6: mod_base = um
  modified_base 7: mod_base = cm
  modified_base 8: mod_base = cm
  modified_base 9: mod_base = OTHER; note = 2'-fluoroadenosine
  modified_base 10: mod_base = OTHER; note = 2'-fluorocytidine
  modified_base 11: mod_base = OTHER; note = 2'-fluoroguanosine
  modified_base 12: mod_base = um
  modified_base 13: mod_base = um
  modified_base 14: mod_base = um
  modified_base 15: mod_base = um
  modified_base 16: mod_base = gm
  modified_base 17: mod_base = OTHER; note = 2'-O-methylinosine
  modified_base 18: mod_base = OTHER; note = 2'-O-methyladenosine
  modified_base 19: mod_base = um
  modified_base 20: mod_base = gm
  modified_base 21: mod_base = OTHER; note = 2'-O-methyladenosine
  source 1..21: mol_type = other RNA
cccaatccacgttttgnatga

SEQ ID NO: 786 - RNA, 21 nt, synthetic construct
  modified_base 1: mod_base = gm
  modified_base 2: mod_base = OTHER; note = 2'-O-methyladenosine
  modified_base 3: mod_base = gm
  modified_base 4: mod_base = gm
  modified_base 5: mod_base = gm
  modified_base 6: mod_base = OTHER; note = 2'-O-methyladenosine
  modified_base 7: mod_base = cm
  modified_base 8: mod_base = gm
  modified_base 9: mod_base = OTHER; note = 2'-fluorouridine
  modified_base 10: mod_base = OTHER; note = 2'-fluoroguanosine
  modified_base 11: mod_base = OTHER; note = 2'-fluorouridine
  modified_base 12: mod_base = um
  modified_base 13: mod_base = gm
  modified_base 14: mod_base = gm
  modified_base 15: mod_base = um
  modified_base 16: mod_base = OTHER; note = 2'-O-methylinosine
  modified_base 17: mod_base = OTHER; note = 2'-O-methyladenosine
  modified_base 18: mod_base = OTHER; note = 2'-O-methyladenosine
  modified_base 19: mod_base = um
  modified_base 20: mod_base = gm
  modified_base 21: mod_base = OTHER; note = 2'-O-methyladenosine
  source 1..21: mol_type = other RNA
gagggacgtgttggtnaatga

SEQ ID NO: 787 - RNA, 21 nt, synthetic construct
  modified_base 1: mod_base = gm
  modified_base 2: mod_base = gm
  modified_base 3: mod_base = OTHER; note = 2'-O-methyladenosine
  modified_base 4: mod_base = um
  modified_base 5: mod_base = gm
  modified_base 6: mod_base = OTHER; note = 2'-O-methyladenosine
  modified_base 7: mod_base = gm
  modified_base 8: mod_base = OTHER; note = 2'-O-methyladenosine
  modified_base 9: mod_base = OTHER; note = 2'-fluoroadenosine
  modified_base 10: mod_base = OTHER; note = 2'-fluorocytidine
  modified_base 11: mod_base = OTHER; note = 2'-fluorouridine
  modified_base 12: mod_base = OTHER; note = 2'-O-methyladenosine
  modified_base 13: mod_base = cm
  modified_base 14: mod_base = cm
  modified_base 15: mod_base = um
  modified_base 16: mod_base = OTHER; note = 2'-O-methylinosine
  modified_base 17: mod_base = um
  modified_base 18: mod_base = OTHER; note = 2'-O-methyladenosine
  modified_base 19: mod_base = cm
  modified_base 20: mod_base = cm
  modified_base 21: mod_base = um
  source 1..21: mol_type = other RNA
ggatgagaactacctntacct

SEQ ID NO: 788 - RNA, 21 nt, synthetic construct
  modified_base 1: mod_base = cm
  modified_base 2: mod_base = cm
  modified_base 3: mod_base = um
  modified_base 4: mod_base = gm
  modified_base 5: mod_base = gm
  modified_base 6: mod_base = um
  modified_base 7: mod_base = cm
  modified_base 8: mod_base = OTHER; note = 2'-O-methyladenosine
  modified_base 9: mod_base = OTHER; note = 2'-fluorouridine
  modified_base 10: mod_base = OTHER; note = 2'-fluoroguanosine
  modified_base 11: mod_base = OTHER; note = 2'-fluoroguanosine
  modified_base 12: mod_base = OTHER; note = 2'-O-methyladenosine
  modified_base 13: mod_base = gm
  modified_base 14: mod_base = um
  modified_base 15: mod_base = OTHER; note = 2'-O-methyladenosine
  modified_base 16: mod_base = um
  modified_base 17: mod_base = um
  modified_base 18: mod_base = OTHER; note = 2'-O-methyladenosine
  modified_base 19: mod_base = cm
  modified_base 20: mod_base = gm
  modified_base 21: mod_base = um
  source 1..21: mol_type = other RNA
cctggtcatggagtattacgt

SEQ ID NO: 789 - RNA, 21 nt, synthetic construct
  modified_base 1: mod_base = gm
  modified_base 2: mod_base = gm
  modified_base 3: mod_base = OTHER; note = 2'-O-methyladenosine
  modified_base 4: mod_base = cm
  modified_base 5: mod_base = OTHER; note = 2'-O-methyladenosine
  modified_base 6: mod_base = um
  modified_base 7: mod_base = cm
  modified_base 8: mod_base = OTHER; note = 2'-O-methyladenosine
  modified_base 9: mod_base = OTHER; note = 2'-fluoroadenosine
  modified_base 10: mod_base = OTHER; note = 2'-fluoroadenosine
  modified_base 11: mod_base = OTHER; note = 2'-fluorocytidine
  modified_base 12: mod_base = cm
  modified_base 13: mod_base = cm
  modified_base 14: mod_base = gm
  modified_base 15: mod_base = OTHER; note = 2'-O-methyladenosine
  modified_base 16: mod_base = cm
  modified_base 17: mod_base = OTHER; note = 2'-O-methyladenosine
  modified_base 18: mod_base = OTHER; note = 2'-O-methyladenosine
  modified_base 19: mod_base = cm
  modified_base 20: mod_base = OTHER; note = 2'-O-methyladenosine
  modified_base 21: mod_base = um
  source 1..21: mol_type = other RNA
ggacatcaaacccgacaacat

SEQ ID NO: 790 - RNA, 21 nt, synthetic construct
  modified_base 1: mod_base = um
  modified_base 2: mod_base = gm
  modified_base 3: mod_base = gm
  modified_base 4: mod_base = cm
  modified_base 5: mod_base = OTHER; note = 2'-O-methyladenosine
  modified_base 6: mod_base = OTHER; note = 2'-O-methyladenosine
  modified_base 7: mod_base = gm
  modified_base 8: mod_base = OTHER; note = 2'-O-methyladenosine
  modified_base 9: mod_base = OTHER; note = 2'-fluorouridine
  modified_base 10: mod_base = OTHER; note = 2'-fluorocytidine
  modified_base 11: mod_base = OTHER; note = 2'-fluoroguanosine
  modified_base 12: mod_base = um
  modified_base 13: mod_base = cm
  modified_base 14: mod_base = cm
  modified_base 15: mod_base = OTHER; note = 2'-O-methyladenosine
  modified_base 16: mod_base = cm
  modified_base 17: mod_base = um
  modified_base 18: mod_base = OTHER; note = 2'-O-methyladenosine
  modified_base 19: mod_base = cm
  modified_base 20: mod_base = OTHER; note = 2'-O-methyladenosine
  modified_base 21: mod_base = OTHER; note = 2'-O-methyladenosine
  source 1..21: mol_type = other RNA
tggcaagatcgtccactacaa

SEQ ID NO: 791 - RNA, 21 nt, synthetic construct
  modified_base 1: mod_base = cm
  modified_base 2: mod_base = cm
  modified_base 3: mod_base = cm
  modified_base 4: mod_base = cm
  modified_base 5: mod_base = um
  modified_base 6: mod_base = um
  modified_base 7: mod_base = um
  modified_base 8: mod_base = OTHER; note = 2'-O-methyladenosine
  modified_base 9: mod_base = OTHER; note = 2'-fluorocytidine
  modified_base 10: mod_base = OTHER; note = 2'-fluoroadenosine
  modified_base 11: mod_base = OTHER; note = 2'-fluorocytidine
  modified_base 12: mod_base = cm
  modified_base 13: mod_base = gm
  modified_base 14: mod_base = gm
  modified_base 15: mod_base = OTHER; note = 2'-O-methyladenosine
  modified_base 16: mod_base = um
  modified_base 17: mod_base = um
  modified_base 18: mod_base = um
  modified_base 19: mod_base = cm
  modified_base 20: mod_base = gm
  modified_base 21: mod_base = OTHER; note = 2'-O-methyladenosine
  source 1..21: mol_type = other RNA
cccctttacaccggatttcga

SEQ ID NO: 792 - RNA, 21 nt, synthetic construct
  modified_base 1: mod_base = cm
  modified_base 2: mod_base = gm
  modified_base 3: mod_base = OTHER; note = 2'-O-methyladenosine
  modified_base 4: mod_base = cm
  modified_base 5: mod_base = OTHER; note = 2'-O-methyladenosine
  modified_base 6: mod_base = cm
  modified_base 7: mod_base = OTHER; note = 2'-O-methyladenosine
  modified_base 8: mod_base = um
  modified_base 9: mod_base = OTHER; note = 2'-fluoroguanosine
  modified_base 10: mod_base = OTHER; note = 2'-fluorocytidine
  modified_base 11: mod_base = OTHER; note = 2'-fluoroadenosine
  modified_base 12: mod_base = OTHER; note = 2'-O-methyladenosine
  modified_base 13: mod_base = cm
  modified_base 14: mod_base = um
  modified_base 15: mod_base = um
  modified_base 16: mod_base = cm
  modified_base 17: mod_base = OTHER; note = 2'-O-methylinosine
  modified_base 18: mod_base = OTHER; note = 2'-O-methyladenosine
  modified_base 19: mod_base = cm
  modified_base 20: mod_base = um
  modified_base 21: mod_base = um
  source 1..21: mol_type = other RNA
cgacacatgcaacttcnactt

SEQ ID NO: 793 - RNA, 21 nt, synthetic construct
  modified_base 1: mod_base = gm
  modified_base 2: mod_base = gm
  modified_base 3: mod_base = OTHER; note = 2'-O-methyladenosine
  modified_base 4: mod_base = OTHER; note = 2'-O-methyladenosine
  modified_base 5: mod_base = cm
  modified_base 6: mod_base = cm
  modified_base 7: mod_base = cm
  modified_base 8: mod_base = um
  modified_base 9: mod_base = OTHER; note = 2'-fluoroadenosine
  modified_base 10: mod_base = OTHER; note = 2'-fluoroguanosine
  modified_base 11: mod_base = OTHER; note = 2'-fluoroadenosine
  modified_base 12: mod_base = OTHER; note = 2'-O-methyladenosine
  modified_base 13: mod_base = cm
  modified_base 14: mod_base = um
  modified_base 15: mod_base = gm
  modified_base 16: mod_base = um
  modified_base 17: mod_base = cm
  modified_base 18: mod_base = um
  modified_base 19: mod_base = um
  modified_base 20: mod_base = cm
  modified_base 21: mod_base = OTHER; note = 2'-O-methyladenosine
  source 1..21: mol_type = other RNA
ggaaccctagaactgtcttca

SEQ ID NO: 794 - RNA, 21 nt, synthetic construct
  modified_base 1: mod_base = gm
  modified_base 2: mod_base = gm
  modified_base 3: mod_base = OTHER; note = 2'-O-methyladenosine
  modified_base 4: mod_base = OTHER; note = 2'-O-methyladenosine
  modified_base 5: mod_base = cm
  modified_base 6: mod_base = cm
  modified_base 7: mod_base = cm
  modified_base 8: mod_base = um
  modified_base 9: mod_base = OTHER; note = 2'-fluoroadenosine
  modified_base 10: mod_base = OTHER; note = 2'-fluoroguanosine
  modified_base 11: mod_base = OTHER; note = 2'-fluoroadenosine
  modified_base 12: mod_base = OTHER; note = 2'-O-methyladenosine
  modified_base 13: mod_base = cm
  modified_base 14: mod_base = um
  modified_base 15: mod_base = gm
  modified_base 16: mod_base = um
  modified_base 17: mod_base = um
  modified_base 18: mod_base = um
  modified_base 19: mod_base = um
  modified_base 20: mod_base = cm
  modified_base 21: mod_base = OTHER; note = 2'-O-methyladenosine
  source 1..21: mol_type = other RNA
ggaaccctagaactgttttca

SEQ ID NO: 795 - RNA, 21 nt, synthetic construct
  modified_base 1: mod_base = cm
  modified_base 2: mod_base = um
  modified_base 3: mod_base = gm
  modified_base 4: mod_base = cm
  modified_base 5: mod_base = um
  modified_base 6: mod_base = um
  modified_base 7: mod_base = OTHER; note = 2'-O-methyladenosine
  modified_base 8: mod_base = cm
  modified_base 9: mod_base = OTHER; note = 2'-fluorouridine
  modified_base 10: mod_base = OTHER; note = 2'-fluorocytidine
  modified_base 11: mod_base = OTHER; note = 2'-fluoroguanosine
  modified_base 12: mod_base = gm
  modified_base 13: mod_base = gm
  modified_base 14: mod_base = OTHER; note = 2'-O-methyladenosine
  modified_base 15: mod_base = OTHER; note = 2'-O-methyladenosine
  modified_base 16: mod_base = OTHER; note = 2'-O-methyladenosine
  modified_base 17: mod_base = um
  modified_base 18: mod_base = um
  modified_base 19: mod_base = um
  modified_base 20: mod_base = gm
  modified_base 21: mod_base = OTHER; note = 2'-O-methyladenosine
  source 1..21: mol_type = other RNA
ctgcttactcgggaaatttga

SEQ ID NO: 796 - RNA, 21 nt, synthetic construct
  modified_base 1: mod_base = gm
  modified_base 2: mod_base = cm
  modified_base 3: mod_base = gm
  modified_base 4: mod_base = gm
  modified_base 5: mod_base = um
  modified_base 6: mod_base = um
  modified_base 7: mod_base = um
  modified_base 8: mod_base = gm
  modified_base 9: mod_base = OTHER; note = 2'-fluoroguanosine
  modified_base 10: mod_base = OTHER; note = 2 -O-methyl-2-aminoadenosine
  modified_base 11: mod_base = OTHER; note = 2'-fluorouridine
  modified_base 12: mod_base = OTHER; note = 2'-O-methyladenosine
  modified_base 13: mod_base = OTHER; note = 2'-fluorouridine
  modified_base 14: mod_base = um
  modified_base 15: mod_base = um
  modified_base 16: mod_base = OTHER; note = 2'-O-methyladenosine
  modified_base 17: mod_base = um
  modified_base 18: mod_base = um
  modified_base 19: mod_base = gm
  modified_base 20: mod_base = OTHER; note = 2'-O-methyladenosine
  modified_base 21: mod_base = OTHER; note = 2'-O-methyladenosine
  source 1..21: mol_type = other RNA
gcggtttggntatttattgaa

SEQ ID NO: 797 - RNA, 21 nt, synthetic construct
  modified_base 1: mod_base = gm
  modified_base 2: mod_base = cm
  modified_base 3: mod_base = OTHER; note = 2'-O-methyladenosine
  modified_base 4: mod_base = um
  modified_base 5: mod_base = um
  modified_base 6: mod_base = cm
  modified_base 7: mod_base = cm
  modified_base 8: mod_base = um
  modified_base 9: mod_base = OTHER; note = 2'-fluorocytidine
  modified_base 10: mod_base = OTHER; note = 2'-fluoroguanosine
  modified_base 11: mod_base = OTHER; note = 2'-fluoroguanosine
  modified_base 12: mod_base = um
  modified_base 13: mod_base = OTHER; note = 2'-O-methyladenosine
  modified_base 14: mod_base = um
  modified_base 15: mod_base = um
  modified_base 16: mod_base = um
  modified_base 17: mod_base = OTHER; note = 2'-O-methyladenosine
  modified_base 18: mod_base = um
  modified_base 19: mod_base = um
  modified_base 20: mod_base = gm
  modified_base 21: mod_base = um
  source 1..21: mol_type = other RNA
gcattcctcggtatttattgt

SEQ ID NO: 798 - RNA, 21 nt, synthetic construct
  modified_base 1: mod_base = gm
  modified_base 2: mod_base = cm
  modified_base 3: mod_base = OTHER; note = 2'-O-methyladenosine
  modified_base 4: mod_base = um
  modified_base 5: mod_base = um
  modified_base 6: mod_base = cm
  modified_base 7: mod_base = cm
  modified_base 8: mod_base = um
  modified_base 9: mod_base = OTHER; note = 2'-fluorocytidine
  modified_base 10: mod_base = OTHER; note = 2'-fluoroguanosine
  modified_base 11: mod_base = OTHER; note = 2'-fluoroguanosine
  modified_base 12: mod_base = um
  modified_base 13: mod_base = OTHER; note = 2'-O-methyladenosine
  modified_base 14: mod_base = um
  modified_base 15: mod_base = um
  modified_base 16: mod_base = um
  modified_base 17: mod_base = OTHER; note = 2 -O-methyl-2-aminoadenosine
  modified_base 18: mod_base = um
  modified_base 19: mod_base = um
  modified_base 20: mod_base = gm
  modified_base 21: mod_base = um
  source 1..21: mol_type = other RNA
gcattcctcggtatttnttgt

SEQ ID NO: 799 - RNA, 21 nt, synthetic construct
  modified_base 1: mod_base = gm
  modified_base 2: mod_base = OTHER; note = 2'-O-methyladenosine
  modified_base 3: mod_base = cm
  modified_base 4: mod_base = cm
  modified_base 5: mod_base = cm
  modified_base 6: mod_base = um
  modified_base 7: mod_base = cm
  modified_base 8: mod_base = gm
  modified_base 9: mod_base = OTHER; note = 2'-fluorocytidine
  modified_base 10: mod_base = OTHER; note = 2'-fluoroguanosine
  modified_base 11: mod_base = OTHER; note = 2'-fluoroadenosine
  modified_base 12: mod_base = OTHER; note = 2'-O-methyladenosine
  modified_base 13: mod_base = um
  modified_base 14: mod_base = OTHER; note = 2'-O-methyladenosine
  modified_base 15: mod_base = OTHER; note = 2'-O-methyladenosine
  modified_base 16: mod_base = OTHER; note = 2'-O-methyladenosine
  modified_base 17: mod_base = OTHER; note = 2'-O-methyladenosine
  modified_base 18: mod_base = gm
  modified_base 19: mod_base = OTHER; note = 2'-O-methylinosine
  modified_base 20: mod_base = cm
  modified_base 21: mod_base = OTHER; note = 2'-O-methyladenosine
  source 1..21: mol_type = other RNA
gaccctcgcgaataaaagnca

SEQ ID NO: 800 - RNA, 22 nt, synthetic construct
  modified_base 1: mod_base = OTHER; note = 2'-O-methyladenosine
  modified_base 2: mod_base = gm
  modified_base 3: mod_base = gm
  modified_base 4: mod_base = gm
  modified_base 5: mod_base = gm
  modified_base 6: mod_base = cm
  modified_base 7: mod_base = gm
  modified_base 8: mod_base = OTHER; note = 2'-O-methyladenosine
  modified_base 9: mod_base = OTHER; note = 2'-fluoroguanosine
  modified_base 10: mod_base = OTHER; note = 2'-fluoroguanosine
  modified_base 11: mod_base = OTHER; note = 2'-fluorouridine
  modified_base 12: mod_base = gm
  modified_base 13: mod_base = um
  modified_base 14: mod_base = cm
  modified_base 15: mod_base = gm
  modified_base 16: mod_base = um
  modified_base 17: mod_base = gm
  modified_base 18: mod_base = cm
  modified_base 19: mod_base = um
  modified_base 20: mod_base = um
  modified_base 21: mod_base = OTHER; note = 2'-O-methyladenosine
  modified_base 22: mod_base = OTHER; note = 2 -deoxythymidine
  source 1..22: mol_type = other RNA
aggggcgaggtgtcgtgcttat

SEQ ID NO: 801 - RNA, 22 nt, synthetic construct
  modified_base 1: mod_base = gm
  modified_base 2: mod_base = gm
  modified_base 3: mod_base = cm
  modified_base 4: mod_base = OTHER; note = 2'-O-methyladenosine
  modified_base 5: mod_base = gm
  modified_base 6: mod_base = OTHER; note = 2'-O-methyladenosine
  modified_base 7: mod_base = cm
  modified_base 8: mod_base = gm
  modified_base 9: mod_base = OTHER; note = 2'-fluorocytidine
  modified_base 10: mod_base = OTHER; note = 2'-fluorocytidine
  modified_base 11: mod_base = OTHER; note = 2'-fluorocytidine
  modified_base 12: mod_base = um
  modified_base 13: mod_base = um
  modified_base 14: mod_base = cm
  modified_base 15: mod_base = um
  modified_base 16: mod_base = OTHER; note = 2'-O-methyladenosine
  modified_base 17: mod_base = cm
  modified_base 18: mod_base = gm
  modified_base 19: mod_base = cm
  modified_base 20: mod_base = gm
  modified_base 21: mod_base = OTHER; note = 2'-O-methyladenosine
  modified_base 22: mod_base = OTHER; note = 2 -deoxythymidine
  source 1..22: mol_type = other RNA
ggcagacgcccttctacgcgat

SEQ ID NO: 802 - RNA, 22 nt, synthetic construct
  modified_base 1: mod_base = gm
  modified_base 2: mod_base = gm
  modified_base 3: mod_base = cm
  modified_base 4: mod_base = OTHER; note = 2'-O-methyladenosine
  modified_base 5: mod_base = gm
  modified_base 6: mod_base = OTHER; note = 2'-O-methyladenosine
  modified_base 7: mod_base = cm
  modified_base 8: mod_base = cm
  modified_base 9: mod_base = OTHER; note = 2'-fluorocytidine
  modified_base 10: mod_base = OTHER; note = 2'-fluorocytidine
  modified_base 11: mod_base = OTHER; note = 2'-fluorocytidine
  modified_base 12: mod_base = um
  modified_base 13: mod_base = um
  modified_base 14: mod_base = cm
  modified_base 15: mod_base = um
  modified_base 16: mod_base = OTHER; note = 2'-O-methyladenosine
  modified_base 17: mod_base = cm
  modified_base 18: mod_base = gm
  modified_base 19: mod_base = cm
  modified_base 20: mod_base = gm
  modified_base 21: mod_base = OTHER; note = 2'-O-methyladenosine
  modified_base 22: mod_base = OTHER; note = 2 -deoxythymidine
  source 1..22: mol_type = other RNA
ggcagacccccttctacgcgat

SEQ ID NO: 803 - RNA, 22 nt, synthetic construct
  modified_base 1: mod_base = cm
  modified_base 2: mod_base = cm
  modified_base 3: mod_base = cm
  modified_base 4: mod_base = cm
  modified_base 5: mod_base = gm
  modified_base 6: mod_base = OTHER; note = 2'-O-methyladenosine
  modified_base 7: mod_base = cm
  modified_base 8: mod_base = OTHER; note = 2'-O-methyladenosine
  modified_base 9: mod_base = OTHER; note = 2'-fluorouridine
  modified_base 10: mod_base = OTHER; note = 2'-fluorouridine
  modified_base 11: mod_base = OTHER; note = 2'-fluorocytidine
  modified_base 12: mod_base = cm
  modified_base 13: mod_base = um
  modified_base 14: mod_base = cm
  modified_base 15: mod_base = gm
  modified_base 16: mod_base = gm
  modified_base 17: mod_base = um
  modified_base 18: mod_base = OTHER; note = 2'-O-methyladenosine
  modified_base 19: mod_base = um
  modified_base 20: mod_base = um
  modified_base 21: mod_base = OTHER; note = 2'-O-methyladenosine
  modified_base 22: mod_base = OTHER; note = 2 -deoxythymidine
  source 1..22: mol_type = other RNA
ccccgacattcctcggtattat

SEQ ID NO: 804 - RNA, 22 nt, synthetic construct
  modified_base 1: mod_base = um
  modified_base 2: mod_base = um
  modified_base 3: mod_base = cm
  modified_base 4: mod_base = cm
  modified_base 5: mod_base = um
  modified_base 6: mod_base = cm
  modified_base 7: mod_base = gm
  modified_base 8: mod_base = gm
  modified_base 9: mod_base = OTHER; note = 2'-fluorouridine
  modified_base 10: mod_base = OTHER; note = 2'-fluoroadenosine
  modified_base 11: mod_base = OTHER; note = 2'-fluorouridine
  modified_base 12: mod_base = um
  modified_base 13: mod_base = um
  modified_base 14: mod_base = OTHER; note = 2'-O-methyladenosine
  modified_base 15: mod_base = um
  modified_base 16: mod_base = um
  modified_base 17: mod_base = gm
  modified_base 18: mod_base = um
  modified_base 19: mod_base = cm
  modified_base 20: mod_base = um
  modified_base 21: mod_base = OTHER; note = 2'-O-methyladenosine
  modified_base 22: mod_base = OTHER; note = 2 -deoxythymidine
  source 1..22: mol_type = other RNA
ttcctcggtatttattgtctat

SEQ ID NO: 805 - RNA, 21 nt, synthetic construct
  modified_base 1: mod_base = gm
  modified_base 2: mod_base = cm
  modified_base 3: mod_base = gm
  modified_base 4: mod_base = OTHER; note = 2'-O-methyladenosine
  modified_base 5: mod_base = gm
  modified_base 6: mod_base = gm
  modified_base 7: mod_base = OTHER; note = 2'-fluorouridine
  modified_base 8: mod_base = OTHER; note = 2'-fluoroadenosine
  modified_base 9: mod_base = OTHER; note = 2'-fluoroguanosine
  modified_base 10: mod_base = cm
  modified_base 11: mod_base = gm
  modified_base 12: mod_base = gm
  modified_base 13: mod_base = um
  modified_base 14: mod_base = OTHER; note = 2'-O-methyladenosine
  modified_base 15: mod_base = gm
  modified_base 16: mod_base = um
  modified_base 17: mod_base = gm
  modified_base 18: mod_base = OTHER; note = 2'-O-methyladenosine
  modified_base 19: mod_base = OTHER; note = 2'-O-methyladenosine
  modified_base 20: mod_base = OTHER; note = 2 -deoxythymidine
  modified_base 21: mod_base = OTHER; note = 2 -deoxythymidine
  source 1..21: mol_type = other RNA
gcgaggtagcggtagtgaatt

SEQ ID NO: 806 - RNA, 21 nt, synthetic construct
  modified_base 1: mod_base = OTHER; note = 2'-O-methyladenosine
  modified_base 2: mod_base = gm
  modified_base 3: mod_base = gm
  modified_base 4: mod_base = gm
  modified_base 5: mod_base = gm
  modified_base 6: mod_base = cm
  modified_base 7: mod_base = gm
  modified_base 8: mod_base = OTHER; note = 2'-O-methyladenosine
  modified_base 9: mod_base = OTHER; note = 2'-fluoroguanosine
  modified_base 10: mod_base = OTHER; note = 2'-fluoroguanosine
  modified_base 11: mod_base = OTHER; note = 2'-fluorouridine
  modified_base 12: mod_base = gm
  modified_base 13: mod_base = um
  modified_base 14: mod_base = cm
  modified_base 15: mod_base = gm
  modified_base 16: mod_base = um
  modified_base 17: mod_base = gm
  modified_base 18: mod_base = cm
  modified_base 19: mod_base = um
  modified_base 20: mod_base = um
  modified_base 21: mod_base = OTHER; note = 2'-O-methyladenosine
  source 1..21: mol_type = other RNA
aggggcgaggtgtcgtgctta

SEQ ID NO: 807 - RNA, 21 nt, synthetic construct
  modified_base 1: mod_base = cm
  modified_base 2: mod_base = cm
  modified_base 3: mod_base = cm
  modified_base 4: mod_base = cm
  modified_base 5: mod_base = gm
  modified_base 6: mod_base = OTHER; note = 2'-O-methyladenosine
  modified_base 7: mod_base = cm
  modified_base 8: mod_base = OTHER; note = 2'-O-methyladenosine
  modified_base 9: mod_base = OTHER; note = 2'-fluorouridine
  modified_base 10: mod_base = OTHER; note = 2'-fluorouridine
  modified_base 11: mod_base = OTHER; note = 2'-fluorocytidine
  modified_base 12: mod_base = cm
  modified_base 13: mod_base = um
  modified_base 14: mod_base = cm
  modified_base 15: mod_base = gm
  modified_base 16: mod_base = gm
  modified_base 17: mod_base = um
  modified_base 18: mod_base = OTHER; note = 2'-O-methyladenosine
  modified_base 19: mod_base = um
  modified_base 20: mod_base = um
  modified_base 21: mod_base = OTHER; note = 2'-O-methyladenosine
  source 1..21: mol_type = other RNA
ccccgacattcctcggtatta

SEQ ID NO: 808 - RNA, 21 nt, synthetic construct
  modified_base 1: mod_base = um
  modified_base 2: mod_base = um
  modified_base 3: mod_base = cm
  modified_base 4: mod_base = cm
  modified_base 5: mod_base = um
  modified_base 6: mod_base = cm
  modified_base 7: mod_base = gm
  modified_base 8: mod_base = gm
  modified_base 9: mod_base = OTHER; note = 2'-fluorouridine
  modified_base 10: mod_base = OTHER; note = 2'-fluoroadenosine
  modified_base 11: mod_base = OTHER; note = 2'-fluorouridine
  modified_base 12: mod_base = um
  modified_base 13: mod_base = um
  modified_base 14: mod_base = OTHER; note = 2'-O-methyladenosine
  modified_base 15: mod_base = um
  modified_base 16: mod_base = um
  modified_base 17: mod_base = gm
  modified_base 18: mod_base = um
  modified_base 19: mod_base = cm
  modified_base 20: mod_base = um
  modified_base 21: mod_base = OTHER; note = 2'-O-methyladenosine
  source 1..21: mol_type = other RNA
ttcctcggtatttattgtcta

SEQ ID NO: 809 - RNA, 21 nt, synthetic construct
  modified_base 1: mod_base = OTHER; note = 2'-O-methyladenosine
  modified_base 2: mod_base = cm
  modified_base 3: mod_base = um
  modified_base 4: mod_base = cm
  modified_base 5: mod_base = gm
  modified_base 6: mod_base = gm
  modified_base 7: mod_base = gm
  modified_base 8: mod_base = OTHER; note = 2'-O-methyladenosine
  modified_base 9: mod_base = OTHER; note = 2'-fluoroadenosine
  modified_base 10: mod_base = OTHER; note = 2'-fluoroadenosine
  modified_base 11: mod_base = OTHER; note = 2'-fluorouridine
  modified_base 12: mod_base = um
  modified_base 13: mod_base = um
  modified_base 14: mod_base = gm
  modified_base 15: mod_base = cm
  modified_base 16: mod_base = um
  modified_base 17: mod_base = um
  modified_base 18: mod_base = um
  modified_base 19: mod_base = um
  modified_base 20: mod_base = gm
  modified_base 21: mod_base = OTHER; note = 2'-O-methyladenosine
  source 1..21: mol_type = other RNA
actcgggaaatttgcttttga

SEQ ID NO: 810 - RNA, 21 nt, synthetic construct
  modified_base 1: mod_base = gm
  modified_base 2: mod_base = gm
  modified_base 3: mod_base = OTHER; note = 2'-O-methyladenosine
  modified_base 4: mod_base = OTHER; note = 2'-O-methyladenosine
  modified_base 5: mod_base = OTHER; note = 2'-O-methyladenosine
  modified_base 6: mod_base = um
  modified_base 7: mod_base = um
  modified_base 8: mod_base = um
  modified_base 9: mod_base = OTHER; note = 2'-fluoroguanosine
  modified_base 10: mod_base = OTHER; note = 2'-fluorocytidine
  modified_base 11: mod_base = OTHER; note = 2'-fluorouridine
  modified_base 12: mod_base = um
  modified_base 13: mod_base = um
  modified_base 14: mod_base = um
  modified_base 15: mod_base = gm
  modified_base 16: mod_base = um
  modified_base 17: mod_base = cm
  modified_base 18: mod_base = OTHER; note = 2'-O-methyladenosine
  modified_base 19: mod_base = OTHER; note = 2'-O-methyladenosine
  modified_base 20: mod_base = OTHER; note = 2'-O-methyladenosine
  modified_base 21: mod_base = OTHER; note = 2'-O-methyladenosine
  source 1..21: mol_type = other RNA
ggaaatttgcttttgtcaaaa

SEQ ID NO: 811 - RNA, 21 nt, synthetic construct
  modified_base 1: mod_base = um
  modified_base 2: mod_base = cm
  modified_base 3: mod_base = gm
  modified_base 4: mod_base = gm
  modified_base 5: mod_base = cm
  modified_base 6: mod_base = gm
  modified_base 7: mod_base = gm
  modified_base 8: mod_base = um
  modified_base 9: mod_base = OTHER; note = 2'-fluorouridine
  modified_base 10: mod_base = OTHER; note = 2'-fluorouridine
  modified_base 11: mod_base = OTHER; note = 2'-fluoroguanosine
  modified_base 12: mod_base = gm
  modified_base 13: mod_base = OTHER; note = 2'-O-methyladenosine
  modified_base 14: mod_base = um
  modified_base 15: mod_base = OTHER; note = 2'-O-methyladenosine
  modified_base 16: mod_base = um
  modified_base 17: mod_base = um
  modified_base 18: mod_base = um
  modified_base 19: mod_base = OTHER; note = 2 -O-methyl-2-aminoadenosine
  modified_base 20: mod_base = um
  modified_base 21: mod_base = um
  source 1..21: mol_type = other RNA
tcggcggtttggatatttntt

SEQ ID NO: 812 - RNA, 21 nt, synthetic construct
  modified_base 1: mod_base = cm
  modified_base 2: mod_base = gm
  modified_base 3: mod_base = gm
  modified_base 4: mod_base = cm
  modified_base 5: mod_base = gm
  modified_base 6: mod_base = gm
  modified_base 7: mod_base = um
  modified_base 8: mod_base = um
  modified_base 9: mod_base = OTHER; note = 2'-fluorouridine
  modified_base 10: mod_base = OTHER; note = 2'-fluoroguanosine
  modified_base 11: mod_base = OTHER; note = 2'-fluoroguanosine
  modified_base 12: mod_base = OTHER; note = 2'-O-methyladenosine
  modified_base 13: mod_base = um
  modified_base 14: mod_base = OTHER; note = 2'-O-methyladenosine
  modified_base 15: mod_base = um
  modified_base 16: mod_base = um
  modified_base 17: mod_base = um
  modified_base 18: mod_base = OTHER; note = 2 -O-methyl-2-aminoadenosine
  modified_base 19: mod_base = um
  modified_base 20: mod_base = um
  modified_base 21: mod_base = OTHER; note = 2'-O-methyladenosine
  source 1..21: mol_type = other RNA
cggcggtttggatatttntta

SEQ ID NO: 813 - RNA, 21 nt, synthetic construct
  modified_base 1: mod_base = OTHER; note = 2'-O-methyladenosine
  modified_base 2: mod_base = OTHER; note = 2'-O-methyladenosine
  modified_base 3: mod_base = cm
  modified_base 4: mod_base = cm
  modified_base 5: mod_base = cm
  modified_base 6: mod_base = cm
  modified_base 7: mod_base = OTHER; note = 2'-O-methyladenosine
  modified_base 8: mod_base = OTHER; note = 2'-O-methyladenosine
  modified_base 9: mod_base = OTHER; note = 2'-fluorouridine
  modified_base 10: mod_base = OTHER; note = 2'-fluorocytidine
  modified_base 11: mod_base = OTHER; note = 2'-fluorocytidine
  modified_base 12: mod_base = OTHER; note = 2'-O-methyladenosine
  modified_base 13: mod_base = cm
  modified_base 14: mod_base = gm
  modified_base 15: mod_base = um
  modified_base 16: mod_base = um
  modified_base 17: mod_base = um
  modified_base 18: mod_base = um
  modified_base 19: mod_base = gm
  modified_base 20: mod_base = gm
  modified_base 21: mod_base = OTHER; note = 2'-O-methyladenosine
  source 1..21: mol_type = other RNA
aaccccaatccacgttttgga

SEQ ID NO: 814 - RNA, 21 nt, synthetic construct
  modified_base 1: mod_base = gm
  modified_base 2: mod_base = OTHER; note = 2'-O-methyladenosine
  modified_base 3: mod_base = um
  modified_base 4: mod_base = cm
  modified_base 5: mod_base = cm
  modified_base 6: mod_base = OTHER; note = 2'-O-methyladenosine
  modified_base 7: mod_base = cm
  modified_base 8: mod_base = gm
  modified_base 9: mod_base = OTHER; note = 2'-fluorouridine
  modified_base 10: mod_base = OTHER; note = 2'-fluorouridine
  modified_base 11: mod_base = OTHER; note = 2'-fluorouridine
  modified_base 12: mod_base = um
  modified_base 13: mod_base = gm
  modified_base 14: mod_base = gm
  modified_base 15: mod_base = OTHER; note = 2'-O-methyladenosine
  modified_base 16: mod_base = um
  modified_base 17: mod_base = OTHER; note = 2'-O-methylinosine
  modified_base 18: mod_base = cm
  modified_base 19: mod_base = OTHER; note = 2'-O-methyladenosine
  modified_base 20: mod_base = cm
  modified_base 21: mod_base = um
  source 1..21: mol_type = other RNA
gatccacgttttggatncact

SEQ ID NO: 815 - RNA, 21 nt, synthetic construct
  modified_base 1: mod_base = OTHER; note = 2'-O-methyladenosine
  modified_base 2: mod_base = cm
  modified_base 3: mod_base = gm
  modified_base 4: mod_base = um
  modified_base 5: mod_base = um
  modified_base 6: mod_base = um
  modified_base 7: mod_base = um
  modified_base 8: mod_base = gm
  modified_base 9: mod_base = OTHER; note = 2'-fluoroguanosine
  modified_base 10: mod_base = OTHER; note = 2'-fluoroadenosine
  modified_base 11: mod_base = OTHER; note = 2'-fluorouridine
  modified_base 12: mod_base = gm
  modified_base 13: mod_base = cm
  modified_base 14: mod_base = OTHER; note = 2'-O-methyladenosine
  modified_base 15: mod_base = cm
  modified_base 16: mod_base = um
  modified_base 17: mod_base = OTHER; note = 2'-O-methylinosine
  modified_base 18: mod_base = OTHER; note = 2'-O-methyladenosine
  modified_base 19: mod_base = gm
  modified_base 20: mod_base = OTHER; note = 2'-O-methyladenosine
  modified_base 21: mod_base = OTHER; note = 2'-O-methyladenosine
  source 1..21: mol_type = other RNA
acgttttggatgcactnagaa

SEQ ID NO: 816 - RNA, 21 nt, synthetic construct
  modified_base 1: mod_base = cm
  modified_base 2: mod_base = gm
  modified_base 3: mod_base = um
  modified_base 4: mod_base = um
  modified_base 5: mod_base = um
  modified_base 6: mod_base = um
  modified_base 7: mod_base = gm
  modified_base 8: mod_base = gm
  modified_base 9: mod_base = OTHER; note = 2'-fluoroadenosine
  modified_base 10: mod_base = OTHER; note = 2'-fluorouridine
  modified_base 11: mod_base = OTHER; note = 2'-fluoroguanosine
  modified_base 12: mod_base = cm
  modified_base 13: mod_base = OTHER; note = 2'-O-methyladenosine
  modified_base 14: mod_base = cm
  modified_base 15: mod_base = um
  modified_base 16: mod_base = OTHER; note = 2'-O-methylinosine
  modified_base 17: mod_base = OTHER; note = 2'-O-methyladenosine
  modified_base 18: mod_base = gm
  modified_base 19: mod_base = OTHER; note = 2'-O-methyladenosine
  modified_base 20: mod_base = cm
  modified_base 21: mod_base = OTHER; note = 2'-O-methyladenosine
  source 1..21: mol_type = other RNA
cgttttggatgcactnagaca

SEQ ID NO: 817 - RNA, 21 nt, synthetic construct
  modified_base 1: mod_base = OTHER; note = 2'-O-methyladenosine
  modified_base 2: mod_base = um
  modified_base 3: mod_base = um
  modified_base 4: mod_base = cm
  modified_base 5: mod_base = cm
  modified_base 6: mod_base = um
  modified_base 7: mod_base = cm
  modified_base 8: mod_base = gm
  modified_base 9: mod_base = OTHER; note = 2'-fluoroguanosine
  modified_base 10: mod_base = OTHER; note = 2'-fluorouridine
  modified_base 11: mod_base = OTHER; note = 2'-fluoroadenosine
  modified_base 12: mod_base = um
  modified_base 13: mod_base = um
  modified_base 14: mod_base = um
  modified_base 15: mod_base = OTHER; note = 2'-O-methyladenosine
  modified_base 16: mod_base = um
  modified_base 17: mod_base = um
  modified_base 18: mod_base = gm
  modified_base 19: mod_base = um
  modified_base 20: mod_base = cm
  modified_base 21: mod_base = um
  source 1..21: mol_type = other RNA
attcctcggtatttattgtct

SEQ ID NO: 818 - RNA, 21 nt, synthetic construct
  modified_base 1: mod_base = cm
  modified_base 2: mod_base = cm
  modified_base 3: mod_base = um
  modified_base 4: mod_base = cm
  modified_base 5: mod_base = gm
  modified_base 6: mod_base = gm
  modified_base 7: mod_base = um
  modified_base 8: mod_base = OTHER; note = 2'-O-methyladenosine
  modified_base 9: mod_base = OTHER; note = 2'-fluorouridine
  modified_base 10: mod_base = OTHER; note = 2'-fluorouridine
  modified_base 11: mod_base = OTHER; note = 2'-fluorouridine
  modified_base 12: mod_base = OTHER; note = 2'-O-methyladenosine
  modified_base 13: mod_base = um
  modified_base 14: mod_base = um
  modified_base 15: mod_base = gm
  modified_base 16: mod_base = um
  modified_base 17: mod_base = um
  modified_base 18: mod_base = um
  modified_base 19: mod_base = gm
  modified_base 20: mod_base = um
  modified_base 21: mod_base = OTHER; note = 2'-O-methyladenosine
  source 1..21: mol_type = other RNA
cctcggtatttattgtttgta

SEQ ID NO: 819 - RNA, 22 nt, synthetic construct
  modified_base 1: mod_base = gm
  modified_base 2: mod_base = cm
  modified_base 3: mod_base = OTHER; note = 2'-O-methyladenosine
  modified_base 4: mod_base = um
  modified_base 5: mod_base = um
  modified_base 6: mod_base = cm
  modified_base 7: mod_base = cm
  modified_base 8: mod_base = um
  modified_base 9: mod_base = OTHER; note = 2'-fluorocytidine
  modified_base 10: mod_base = OTHER; note = 2'-fluoroguanosine
  modified_base 11: mod_base = OTHER; note = 2'-fluoroguanosine
  modified_base 12: mod_base = um
  modified_base 13: mod_base = OTHER; note = 2'-O-methyladenosine
  modified_base 14: mod_base = um
  modified_base 15: mod_base = um
  modified_base 16: mod_base = um
  modified_base 17: mod_base = OTHER; note = 2'-O-methyladenosine
  modified_base 18: mod_base = um
  modified_base 19: mod_base = um
  modified_base 20: mod_base = gm
  modified_base 21: mod_base = um
  modified_base 22: mod_base = OTHER; note = 2 -deoxythymidine
  source 1..22: mol_type = other RNA
gcattcctcggtatttattgtt

SEQ ID NO: 820 - RNA, 22 nt, synthetic construct
  modified_base 1: mod_base = cm
  modified_base 2: mod_base = cm
  modified_base 3: mod_base = um
  modified_base 4: mod_base = gm
  modified_base 5: mod_base = gm
  modified_base 6: mod_base = um
  modified_base 7: mod_base = cm
  modified_base 8: mod_base = OTHER; note = 2'-O-methyladenosine
  modified_base 9: mod_base = OTHER; note = 2'-fluorouridine
  modified_base 10: mod_base = OTHER; note = 2'-fluoroguanosine
  modified_base 11: mod_base = OTHER; note = 2'-fluoroguanosine
  modified_base 12: mod_base = OTHER; note = 2'-O-methyladenosine
  modified_base 13: mod_base = gm
  modified_base 14: mod_base = um
  modified_base 15: mod_base = OTHER; note = 2'-O-methyladenosine
  modified_base 16: mod_base = um
  modified_base 17: mod_base = um
  modified_base 18: mod_base = OTHER; note = 2'-O-methyladenosine
  modified_base 19: mod_base = cm
  modified_base 20: mod_base = gm
  modified_base 21: mod_base = um
  modified_base 22: mod_base = OTHER; note = 2 -deoxythymidine
  source 1..22: mol_type = other RNA
cctggtcatggagtattacgtt

SEQ ID NO: 821 - RNA, 22 nt, synthetic construct
  modified_base 1: mod_base = gm
  modified_base 2: mod_base = um
  modified_base 3: mod_base = cm
  modified_base 4: mod_base = cm
  modified_base 5: mod_base = um
  modified_base 6: mod_base = cm
  modified_base 7: mod_base = gm
  modified_base 8: mod_base = gm
  modified_base 9: mod_base = OTHER; note = 2'-fluorouridine
  modified_base 10: mod_base = OTHER; note = 2'-fluoroadenosine
  modified_base 11: mod_base = OTHER; note = 2'-fluorouridine
  modified_base 12: mod_base = um
  modified_base 13: mod_base = um
  modified_base 14: mod_base = OTHER; note = 2'-O-methyladenosine
  modified_base 15: mod_base = um
  modified_base 16: mod_base = um
  modified_base 17: mod_base = gm
  modified_base 18: mod_base = um
  modified_base 19: mod_base = cm
  modified_base 20: mod_base = um
  modified_base 21: mod_base = OTHER; note = 2'-O-methyladenosine
  modified_base 22: mod_base = OTHER; note = 2 -deoxythymidine
  source 1..22: mol_type = other RNA
gtcctcggtatttattgtctat

SEQ ID NO: 822 - RNA, 22 nt, synthetic construct
  modified_base 1: mod_base = um
  modified_base 2: mod_base = um
  modified_base 3: mod_base = cm
  modified_base 4: mod_base = cm
  modified_base 5: mod_base = um
  modified_base 6: mod_base = cm
  modified_base 7: mod_base = gm
  modified_base 8: mod_base = gm
  modified_base 9: mod_base = OTHER; note = 2'-fluorouridine
  modified_base 10: mod_base = OTHER; note = 2'-O-methyladenosine
  modified_base 11: mod_base = OTHER; note = 2'-fluorouridine
  modified_base 12: mod_base = um
  modified_base 13: mod_base = OTHER; note = 2'-fluorouridine
  modified_base 14: mod_base = OTHER; note = 2'-O-methyladenosine
  modified_base 15: mod_base = um
  modified_base 16: mod_base = um
  modified_base 17: mod_base = gm
  modified_base 18: mod_base = um
  modified_base 19: mod_base = cm
  modified_base 20: mod_base = um
  modified_base 21: mod_base = OTHER; note = 2'-O-methyladenosine
  modified_base 22: mod_base = OTHER; note = 2 -deoxythymidine
  source 1..22: mol_type = other RNA
ttcctcggtatttattgtctat

SEQ ID NO: 823 - RNA, 21 nt, synthetic construct
  modified_base 1: mod_base = cm
  modified_base 2: mod_base = cm
  modified_base 3: mod_base = um
  modified_base 4: mod_base = gm
  modified_base 5: mod_base = gm
  modified_base 6: mod_base = um
  modified_base 7: mod_base = cm
  modified_base 8: mod_base = OTHER; note = 2'-O-methyladenosine
  modified_base 9: mod_base = OTHER; note = 2'-fluorouridine
  modified_base 10: mod_base = gm
  modified_base 11: mod_base = OTHER; note = 2'-fluoroguanosine
  modified_base 12: mod_base = OTHER; note = 2'-O-methyladenosine
  modified_base 13: mod_base = OTHER; note = 2'-fluoroguanosine
  modified_base 14: mod_base = um
  modified_base 15: mod_base = OTHER; note = 2'-O-methyladenosine
  modified_base 16: mod_base = um
  modified_base 17: mod_base = um
  modified_base 18: mod_base = OTHER; note = 2'-O-methyladenosine
  modified_base 19: mod_base = cm
  modified_base 20: mod_base = gm
  modified_base 21: mod_base = um
  source 1..21: mol_type = other RNA
cctggtcatggagtattacgt

SEQ ID NO: 824 - RNA, 21 nt, synthetic construct
  modified_base 1: mod_base = cm
  modified_base 2: mod_base = cm
  modified_base 3: mod_base = um
  modified_base 4: mod_base = gm
  modified_base 5: mod_base = gm
  modified_base 6: mod_base = um
  modified_base 7: mod_base = cm
  modified_base 8: mod_base = OTHER; note = 2'-O-methyladenosine
  modified_base 9: mod_base = OTHER; note = 2'-fluorouridine
  modified_base 10: mod_base = gm
  modified_base 11: mod_base = OTHER; note = 2'-fluoroguanosine
  modified_base 12: mod_base = OTHER; note = 2'-O-methyladenosine
  modified_base 13: mod_base = gm
  modified_base 14: mod_base = um
  modified_base 15: mod_base = OTHER; note = 2'-O-methyladenosine
  modified_base 16: mod_base = um
  modified_base 17: mod_base = um
  modified_base 18: mod_base = OTHER; note = 2'-O-methyladenosine
  modified_base 19: mod_base = cm
  modified_base 20: mod_base = gm
  modified_base 21: mod_base = um
  source 1..21: mol_type = other RNA
cctggtcatggagtattacgt

SEQ ID NO: 825 - RNA, 21 nt, synthetic construct
  modified_base 1: mod_base = cm
  modified_base 2: mod_base = cm
  modified_base 3: mod_base = cm
  modified_base 4: mod_base = cm
  modified_base 5: mod_base = gm
  modified_base 6: mod_base = OTHER; note = 2'-O-methyladenosine
  modified_base 7: mod_base = cm
  modified_base 8: mod_base = OTHER; note = 2'-O-methyladenosine
  modified_base 9: mod_base = OTHER; note = 2'-fluorouridine
  modified_base 10: mod_base = OTHER; note = 2'-fluorouridine
  modified_base 11: mod_base = OTHER; note = 2'-fluorocytidine
  modified_base 12: mod_base = cm
  modified_base 13: mod_base = um
  modified_base 14: mod_base = cm
  modified_base 15: mod_base = gm
  modified_base 16: mod_base = gm
  modified_base 17: mod_base = um
  modified_base 18: mod_base = OTHER; note = 2'-O-methyladenosine
  modified_base 19: mod_base = um
  modified_base 20: mod_base = um
  modified_base 21: mod_base = OTHER; note = 2'-O-methyladenosine
  source 1..21: mol_type = other RNA
ccccgacattcctcggtatta

SEQ ID NO: 826 - RNA, 21 nt, synthetic construct
  modified_base 1: mod_base = um
  modified_base 2: mod_base = um
  modified_base 3: mod_base = cm
  modified_base 4: mod_base = cm
  modified_base 5: mod_base = um
  modified_base 6: mod_base = cm
  modified_base 7: mod_base = gm
  modified_base 8: mod_base = gm
  modified_base 9: mod_base = OTHER; note = 2'-fluorouridine
  modified_base 10: mod_base = OTHER; note = 2'-fluoroadenosine
  modified_base 11: mod_base = OTHER; note = 2'-fluorouridine
  modified_base 12: mod_base = um
  modified_base 13: mod_base = um
  modified_base 14: mod_base = OTHER; note = 2'-O-methyladenosine
  modified_base 15: mod_base = um
  modified_base 16: mod_base = um
  modified_base 17: mod_base = gm
  modified_base 18: mod_base = um
  modified_base 19: mod_base = cm
  modified_base 20: mod_base = um
  modified_base 21: mod_base = OTHER; note = 2'-O-methyladenosine
  source 1..21: mol_type = other RNA
ttcctcggtatttattgtcta

SEQ ID NO: 827 - RNA, 21 nt, synthetic construct
  modified_base 1: mod_base = um
  modified_base 2: mod_base = gm
  modified_base 3: mod_base = gm
  modified_base 4: mod_base = cm
  modified_base 5: mod_base = OTHER; note = 2'-O-methyladenosine
  modified_base 6: mod_base = OTHER; note = 2'-O-methyladenosine
  modified_base 7: mod_base = gm
  modified_base 8: mod_base = OTHER; note = 2'-O-methyladenosine
  modified_base 9: mod_base = OTHER; note = 2'-fluorouridine
  modified_base 10: mod_base = cm
  modified_base 11: mod_base = OTHER; note = 2'-fluoroguanosine
  modified_base 12: mod_base = um
  modified_base 13: mod_base = cm
  modified_base 14: mod_base = cm
  modified_base 15: mod_base = OTHER; note = 2'-O-methyladenosine
  modified_base 16: mod_base = cm
  modified_base 17: mod_base = um
  modified_base 18: mod_base = OTHER; note = 2'-O-methyladenosine
  modified_base 19: mod_base = cm
  modified_base 20: mod_base = OTHER; note = 2'-O-methyladenosine
  modified_base 21: mod_base = OTHER; note = 2'-O-methyladenosine
  source 1..21: mol_type = other RNA
tggcaagatcgtccactacaa

SEQ ID NO: 828 - RNA, 21 nt, synthetic construct
  modified_base 1: mod_base = um
  modified_base 2: mod_base = gm
  modified_base 3: mod_base = gm
  modified_base 4: mod_base = cm
  modified_base 5: mod_base = OTHER; note = 2'-O-methyladenosine
  modified_base 6: mod_base = OTHER; note = 2'-O-methyladenosine
  modified_base 7: mod_base = OTHER; note = 2'-fluoroguanosine
  modified_base 8: mod_base = OTHER; note = 2'-O-methyladenosine
  modified_base 9: mod_base = OTHER; note = 2'-fluorouridine
  modified_base 10: mod_base = cm
  modified_base 11: mod_base = OTHER; note = 2'-fluoroguanosine
  modified_base 12: mod_base = um
  modified_base 13: mod_base = cm
  modified_base 14: mod_base = cm
  modified_base 15: mod_base = OTHER; note = 2'-O-methyladenosine
  modified_base 16: mod_base = cm
  modified_base 17: mod_base = um
  modified_base 18: mod_base = OTHER; note = 2'-O-methyladenosine
  modified_base 19: mod_base = cm
  modified_base 20: mod_base = OTHER; note = 2'-O-methyladenosine
  modified_base 21: mod_base = OTHER; note = 2'-O-methyladenosine
  source 1..21: mol_type = other RNA
tggcaagatcgtccactacaa

SEQ ID NO: 829 - RNA, 22 nt, synthetic construct
  modified_base 1: mod_base = gm
  modified_base 2: mod_base = um
  modified_base 3: mod_base = cm
  modified_base 4: mod_base = cm
  modified_base 5: mod_base = um
  modified_base 6: mod_base = cm
  modified_base 7: mod_base = gm
  modified_base 8: mod_base = gm
  modified_base 9: mod_base = OTHER; note = 2'-fluorouridine
  modified_base 10: mod_base = OTHER; note = 2'-O-methyladenosine
  modified_base 11: mod_base = OTHER; note = 2'-fluorouridine
  modified_base 12: mod_base = um
  modified_base 13: mod_base = OTHER; note = 2'-fluorouridine
  modified_base 14: mod_base = OTHER; note = 2'-O-methyladenosine
  modified_base 15: mod_base = um
  modified_base 16: mod_base = um
  modified_base 17: mod_base = gm
  modified_base 18: mod_base = um
  modified_base 19: mod_base = cm
  modified_base 20: mod_base = um
  modified_base 21: mod_base = OTHER; note = 2'-O-methyladenosine
  modified_base 22: mod_base = OTHER; note = 2 -deoxythymidine
  source 1..22: mol_type = other RNA
gtcctcggtatttattgtctat

SEQ ID NO: 830 - RNA, 22 nt, synthetic construct
  modified_base 1: mod_base = um
  modified_base 2: mod_base = um
  modified_base 3: mod_base = cm
  modified_base 4: mod_base = cm
  modified_base 5: mod_base = um
  modified_base 6: mod_base = cm
  modified_base 7: mod_base = gm
  modified_base 8: mod_base = gm
  modified_base 9: mod_base = OTHER; note = 2'-fluorouridine
  modified_base 10: mod_base = OTHER; note = 2'-O-methyladenosine
  modified_base 11: mod_base = OTHER; note = 2'-fluorouridine
  modified_base 12: mod_base = OTHER; note = 2'-fluorouridine
  modified_base 13: mod_base = um
  modified_base 14: mod_base = OTHER; note = 2'-O-methyladenosine
  modified_base 15: mod_base = um
  modified_base 16: mod_base = um
  modified_base 17: mod_base = gm
  modified_base 18: mod_base = um
  modified_base 19: mod_base = cm
  modified_base 20: mod_base = um
  modified_base 21: mod_base = OTHER; note = 2'-O-methyladenosine
  modified_base 22: mod_base = OTHER; note = 2 -deoxythymidine
  source 1..22: mol_type = other RNA
ttcctcggtatttattgtctat

SEQ ID NO: 831 - RNA, 22 nt, synthetic construct
  modified_base 1: mod_base = OTHER; note = 2'-O-methyladenosine
  modified_base 2: mod_base = cm
  modified_base 3: mod_base = OTHER; note = 2'-O-methyladenosine
  modified_base 4: mod_base = OTHER; note = 2'-O-methyladenosine
  modified_base 5: mod_base = gm
  modified_base 6: mod_base = um
  modified_base 7: mod_base = gm
  modified_base 8: mod_base = gm
  modified_base 9: mod_base = OTHER; note = 2'-fluoroguanosine
  modified_base 10: mod_base = OTHER; note = 2'-fluoroadenosine
  modified_base 11: mod_base = OTHER; note = 2'-fluorocytidine
  modified_base 12: mod_base = OTHER; note = 2'-O-methyladenosine
  modified_base 13: mod_base = um
  modified_base 14: mod_base = gm
  modified_base 15: mod_base = cm
  modified_base 16: mod_base = um
  modified_base 17: mod_base = OTHER; note = 2'-O-methylinosine
  modified_base 18: mod_base = OTHER; note = 2'-O-methyladenosine
  modified_base 19: mod_base = OTHER; note = 2'-O-methyladenosine
  modified_base 20: mod_base = gm
  modified_base 21: mod_base = OTHER; note = 2'-O-methyladenosine
  modified_base 22: mod_base = OTHER; note = 2 -deoxythymidine
  source 1..22: mol_type = other RNA
acaagtgggacatgctnaagat

SEQ ID NO: 832 - RNA, 22 nt, synthetic construct
  modified_base 1: mod_base = cm
  modified_base 2: mod_base = OTHER; note = 2'-O-methyladenosine
  modified_base 3: mod_base = OTHER; note = 2'-O-methyladenosine
  modified_base 4: mod_base = gm
  modified_base 5: mod_base = um
  modified_base 6: mod_base = gm
  modified_base 7: mod_base = gm
  modified_base 8: mod_base = gm
  modified_base 9: mod_base = OTHER; note = 2'-fluoroadenosine
  modified_base 10: mod_base = OTHER; note = 2'-fluorocytidine
  modified_base 11: mod_base = OTHER; note = 2'-fluoroadenosine
  modified_base 12: mod_base = um
  modified_base 13: mod_base = gm
  modified_base 14: mod_base = cm
  modified_base 15: mod_base = um
  modified_base 16: mod_base = OTHER; note = 2'-O-methylinosine
  modified_base 17: mod_base = OTHER; note = 2'-O-methyladenosine
  modified_base 18: mod_base = OTHER; note = 2'-O-methyladenosine
  modified_base 19: mod_base = gm
  modified_base 20: mod_base = OTHER; note = 2'-O-methyladenosine
  modified_base 21: mod_base = OTHER; note = 2'-O-methyladenosine
  modified_base 22: mod_base = OTHER; note = 2 -deoxythymidine
  source 1..22: mol_type = other RNA
caagtgggacatgctnaagaat

SEQ ID NO: 833 - RNA, 22 nt, synthetic construct
  modified_base 1: mod_base = cm
  modified_base 2: mod_base = um
  modified_base 3: mod_base = um
  modified_base 4: mod_base = cm
  modified_base 5: mod_base = cm
  modified_base 6: mod_base = OTHER; note = 2'-O-methyladenosine
  modified_base 7: mod_base = gm
  modified_base 8: mod_base = gm
  modified_base 9: mod_base = OTHER; note = 2'-fluoroadenosine
  modified_base 10: mod_base = OTHER; note = 2'-fluorouridine
  modified_base 11: mod_base = OTHER; note = 2'-fluoroguanosine
  modified_base 12: mod_base = OTHER; note = 2'-O-methyladenosine
  modified_base 13: mod_base = gm
  modified_base 14: mod_base = OTHER; note = 2'-O-methyladenosine
  modified_base 15: mod_base = OTHER; note = 2'-O-methyladenosine
  modified_base 16: mod_base = cm
  modified_base 17: mod_base = um
  modified_base 18: mod_base = OTHER; note = 2'-O-methyladenosine
  modified_base 19: mod_base = cm
  modified_base 20: mod_base = um
  modified_base 21: mod_base = um
  modified_base 22: mod_base = OTHER; note = 2 -deoxythymidine
  source 1..22: mol_type = other RNA
cttccaggatgagaactacttt

SEQ ID NO: 834 - RNA, 22 nt, synthetic construct
  modified_base 1: mod_base = cm
  modified_base 2: mod_base = um
  modified_base 3: mod_base = um
  modified_base 4: mod_base = cm
  modified_base 5: mod_base = cm
  modified_base 6: mod_base = OTHER; note = 2'-O-methyladenosine
  modified_base 7: mod_base = gm
  modified_base 8: mod_base = gm
  modified_base 9: mod_base = OTHER; note = 2'-fluoroadenosine
  modified_base 10: mod_base = OTHER; note = 2'-fluorouridine
  modified_base 11: mod_base = OTHER; note = 2'-fluoroguanosine
  modified_base 12: mod_base = OTHER; note = 2'-O-methyladenosine
  modified_base 13: mod_base = gm
  modified_base 14: mod_base = OTHER; note = 2'-O-methyladenosine
  modified_base 15: mod_base = OTHER; note = 2'-O-methyladenosine
  modified_base 16: mod_base = cm
  modified_base 17: mod_base = um
  modified_base 18: mod_base = OTHER; note = 2'-O-methyladenosine
  modified_base 19: mod_base = um
  modified_base 20: mod_base = cm
  modified_base 21: mod_base = um
  modified_base 22: mod_base = OTHER; note = 2 -deoxythymidine
  source 1..22: mol_type = other RNA
cttccaggatgagaactatctt

SEQ ID NO: 835 - RNA, 22 nt, synthetic construct
  modified_base 1: mod_base = um
  modified_base 2: mod_base = cm
  modified_base 3: mod_base = cm
  modified_base 4: mod_base = OTHER; note = 2'-O-methyladenosine
  modified_base 5: mod_base = gm
  modified_base 6: mod_base = gm
  modified_base 7: mod_base = OTHER; note = 2'-O-methyladenosine
  modified_base 8: mod_base = um
  modified_base 9: mod_base = OTHER; note = 2'-fluoroguanosine
  modified_base 10: mod_base = OTHER; note = 2'-fluoroadenosine
  modified_base 11: mod_base = OTHER; note = 2'-fluoroguanosine
  modified_base 12: mod_base = OTHER; note = 2'-O-methyladenosine
  modified_base 13: mod_base = OTHER; note = 2'-O-methyladenosine
  modified_base 14: mod_base = cm
  modified_base 15: mod_base = um
  modified_base 16: mod_base = OTHER; note = 2'-O-methyladenosine
  modified_base 17: mod_base = cm
  modified_base 18: mod_base = cm
  modified_base 19: mod_base = um
  modified_base 20: mod_base = OTHER; note = 2'-O-methylinosine
  modified_base 21: mod_base = um
  modified_base 22: mod_base = OTHER; note = 2 -deoxythymidine
  source 1..22: mol_type = other RNA
tccaggatgagaactacctntt

SEQ ID NO: 836 - RNA, 22 nt, synthetic construct
  modified_base 1: mod_base = um
  modified_base 2: mod_base = cm
  modified_base 3: mod_base = cm
  modified_base 4: mod_base = OTHER; note = 2'-O-methyladenosine
  modified_base 5: mod_base = gm
  modified_base 6: mod_base = gm
  modified_base 7: mod_base = OTHER; note = 2'-O-methyladenosine
  modified_base 8: mod_base = um
  modified_base 9: mod_base = OTHER; note = 2'-fluoroguanosine
  modified_base 10: mod_base = OTHER; note = 2'-fluoroadenosine
  modified_base 11: mod_base = OTHER; note = 2'-fluoroguanosine
  modified_base 12: mod_base = OTHER; note = 2'-O-methyladenosine
  modified_base 13: mod_base = OTHER; note = 2'-O-methyladenosine
  modified_base 14: mod_base = cm
  modified_base 15: mod_base = um
  modified_base 16: mod_base = OTHER; note = 2'-O-methyladenosine
  modified_base 17: mod_base = cm
  modified_base 18: mod_base = um
  modified_base 19: mod_base = um
  modified_base 20: mod_base = gm
  modified_base 21: mod_base = um
  modified_base 22: mod_base = OTHER; note = 2 -deoxythymidine
  source 1..22: mol_type = other RNA
tccaggatgagaactacttgtt

SEQ ID NO: 837 - RNA, 22 nt, synthetic construct
  modified_base 1: mod_base = OTHER; note = 2'-O-methyladenosine
  modified_base 2: mod_base = gm
  modified_base 3: mod_base = gm
  modified_base 4: mod_base = OTHER; note = 2'-O-methyladenosine
  modified_base 5: mod_base = um
  modified_base 6: mod_base = gm
  modified_base 7: mod_base = OTHER; note = 2'-O-methyladenosine
  modified_base 8: mod_base = gm
  modified_base 9: mod_base = OTHER; note = 2'-fluoroadenosine
  modified_base 10: mod_base = OTHER; note = 2'-fluoroadenosine
  modified_base 11: mod_base = OTHER; note = 2'-fluorocytidine
  modified_base 12: mod_base = um
  modified_base 13: mod_base = OTHER; note = 2'-O-methyladenosine
  modified_base 14: mod_base = cm
  modified_base 15: mod_base = cm
  modified_base 16: mod_base = um
  modified_base 17: mod_base = OTHER; note = 2'-O-methylinosine
  modified_base 18: mod_base = um
  modified_base 19: mod_base = OTHER; note = 2'-O-methyladenosine
  modified_base 20: mod_base = cm
  modified_base 21: mod_base = OTHER; note = 2'-O-methyladenosine
  modified_base 22: mod_base = OTHER; note = 2 -deoxythymidine
  source 1..22: mol_type = other RNA
aggatgagaactacctntacat

SEQ ID NO: 838 - RNA, 22 nt, synthetic construct
  modified_base 1: mod_base = cm
  modified_base 2: mod_base = um
  modified_base 3: mod_base = OTHER; note = 2'-O-methyladenosine
  modified_base 4: mod_base = cm
  modified_base 5: mod_base = cm
  modified_base 6: mod_base = um
  modified_base 7: mod_base = gm
  modified_base 8: mod_base = um
  modified_base 9: mod_base = OTHER; note = 2'-fluoroadenosine
  modified_base 10: mod_base = OTHER; note = 2'-fluorocytidine
  modified_base 11: mod_base = OTHER; note = 2'-fluorocytidine
  modified_base 12: mod_base = um
  modified_base 13: mod_base = gm
  modified_base 14: mod_base = gm
  modified_base 15: mod_base = um
  modified_base 16: mod_base = cm
  modified_base 17: mod_base = OTHER; note = 2'-O-methyladenosine
  modified_base 18: mod_base = um
  modified_base 19: mod_base = OTHER; note = 2'-O-methylinosine
  modified_base 20: mod_base = gm
  modified_base 21: mod_base = OTHER; note = 2'-O-methyladenosine
  modified_base 22: mod_base = OTHER; note = 2 -deoxythymidine
  source 1..22: mol_type = other RNA
ctacctgtacctggtcatngat

SEQ ID NO: 839 - RNA, 22 nt, synthetic construct
  modified_base 1: mod_base = cm
  modified_base 2: mod_base = um
  modified_base 3: mod_base = OTHER; note = 2'-O-methyladenosine
  modified_base 4: mod_base = cm
  modified_base 5: mod_base = cm
  modified_base 6: mod_base = um
  modified_base 7: mod_base = gm
  modified_base 8: mod_base = um
  modified_base 9: mod_base = OTHER; note = 2'-fluoroadenosine
  modified_base 10: mod_base = OTHER; note = 2'-fluorocytidine
  modified_base 11: mod_base = OTHER; note = 2'-fluorocytidine
  modified_base 12: mod_base = um
  modified_base 13: mod_base = gm
  modified_base 14: mod_base = gm
  modified_base 15: mod_base = um
  modified_base 16: mod_base = um
  modified_base 17: mod_base = OTHER; note = 2'-O-methyladenosine
  modified_base 18: mod_base = um
  modified_base 19: mod_base = gm
  modified_base 20: mod_base = gm
  modified_base 21: mod_base = OTHER; note = 2'-O-methyladenosine
  modified_base 22: mod_base = OTHER; note = 2 -deoxythymidine
  source 1..22: mol_type = other RNA
ctacctgtacctggttatggat

SEQ ID NO: 840 - RNA, 22 nt, synthetic construct
  modified_base 1: mod_base = OTHER; note = 2'-O-methyladenosine
  modified_base 2: mod_base = cm
  modified_base 3: mod_base = OTHER; note = 2'-O-methyladenosine
  modified_base 4: mod_base = cm
  modified_base 5: mod_base = um
  modified_base 6: mod_base = gm
  modified_base 7: mod_base = cm
  modified_base 8: mod_base = um
  modified_base 9: mod_base = OTHER; note = 2'-fluoroguanosine
  modified_base 10: mod_base = OTHER; note = 2'-fluoroadenosine
  modified_base 11: mod_base = OTHER; note = 2'-fluoroguanosine
  modified_base 12: mod_base = cm
  modified_base 13: mod_base = OTHER; note = 2'-O-methyladenosine
  modified_base 14: mod_base = OTHER; note = 2'-O-methyladenosine
  modified_base 15: mod_base = gm
  modified_base 16: mod_base = um
  modified_base 17: mod_base = um
  modified_base 18: mod_base = um
  modified_base 19: mod_base = OTHER; note = 2'-O-methylinosine
  modified_base 20: mod_base = gm
  modified_base 21: mod_base = OTHER; note = 2'-O-methyladenosine
  modified_base 22: mod_base = OTHER; note = 2 -deoxythymidine
  source 1..22: mol_type = other RNA
acactgctgagcaagtttngat

SEQ ID NO: 841 - RNA, 21 nt, synthetic construct
  modified_base 1: mod_base = cm
  modified_base 2: mod_base = um
  modified_base 3: mod_base = OTHER; note = 2'-O-methyladenosine
  modified_base 4: mod_base = cm
  modified_base 5: mod_base = OTHER; note = 2'-O-methyladenosine
  modified_base 6: mod_base = OTHER; note = 2'-O-methyladenosine
  modified_base 7: mod_base = gm
  modified_base 8: mod_base = gm
  modified_base 9: mod_base = OTHER; note = 2'-fluoroadenosine
  modified_base 10: mod_base = OTHER; note = 2'-fluoroguanosine
  modified_base 11: mod_base = OTHER; note = 2'-fluorocytidine
  modified_base 12: mod_base = OTHER; note = 2'-O-methyladenosine
  modified_base 13: mod_base = cm
  modified_base 14: mod_base = cm
  modified_base 15: mod_base = um
  modified_base 16: mod_base = cm
  modified_base 17: mod_base = um
  modified_base 18: mod_base = um
  modified_base 19: mod_base = um
  modified_base 20: mod_base = cm
  modified_base 21: mod_base = um
  source 1..21: mol_type = other RNA
ctacaaggagcacctctttct

SEQ ID NO: 842 - RNA, 21 nt, synthetic construct
  modified_base 1: mod_base = cm
  modified_base 2: mod_base = um
  modified_base 3: mod_base = OTHER; note = 2'-O-methyladenosine
  modified_base 4: mod_base = cm
  modified_base 5: mod_base = OTHER; note = 2'-O-methyladenosine
  modified_base 6: mod_base = OTHER; note = 2'-O-methyladenosine
  modified_base 7: mod_base = gm
  modified_base 8: mod_base = gm
  modified_base 9: mod_base = OTHER; note = 2'-fluoroadenosine
  modified_base 10: mod_base = OTHER; note = 2'-fluoroguanosine
  modified_base 11: mod_base = OTHER; note = 2'-fluorocytidine
  modified_base 12: mod_base = OTHER; note = 2'-O-methyladenosine
  modified_base 13: mod_base = cm
  modified_base 14: mod_base = cm
  modified_base 15: mod_base = um
  modified_base 16: mod_base = um
  modified_base 17: mod_base = um
  modified_base 18: mod_base = cm
  modified_base 19: mod_base = um
  modified_base 20: mod_base = cm
  modified_base 21: mod_base = um
  source 1..21: mol_type = other RNA
ctacaaggagcacctttctct

SEQ ID NO: 843 - RNA, 21 nt, synthetic construct
  modified_base 1: mod_base = cm
  modified_base 2: mod_base = gm
  modified_base 3: mod_base = gm
  modified_base 4: mod_base = OTHER; note = 2'-O-methyladenosine
  modified_base 5: mod_base = cm
  modified_base 6: mod_base = OTHER; note = 2'-O-methyladenosine
  modified_base 7: mod_base = cm
  modified_base 8: mod_base = OTHER; note = 2'-O-methyladenosine
  modified_base 9: mod_base = OTHER; note = 2'-fluorouridine
  modified_base 10: mod_base = OTHER; note = 2'-fluorocytidine
  modified_base 11: mod_base = OTHER; note = 2'-fluorocytidine
  modified_base 12: mod_base = cm
  modified_base 13: mod_base = um
  modified_base 14: mod_base = um
  modified_base 15: mod_base = cm
  modified_base 16: mod_base = um
  modified_base 17: mod_base = um
  modified_base 18: mod_base = cm
  modified_base 19: mod_base = um
  modified_base 20: mod_base = um
  modified_base 21: mod_base = um
  source 1..21: mol_type = other RNA
cggacacatcccttcttcttt

SEQ ID NO: 844 - RNA, 21 nt, synthetic construct
  modified_base 1: mod_base = gm
  modified_base 2: mod_base = OTHER; note = 2'-O-methyladenosine
  modified_base 3: mod_base = cm
  modified_base 4: mod_base = OTHER; note = 2'-O-methyladenosine
  modified_base 5: mod_base = cm
  modified_base 6: mod_base = OTHER; note = 2'-O-methyladenosine
  modified_base 7: mod_base = um
  modified_base 8: mod_base = cm
  modified_base 9: mod_base = OTHER; note = 2'-fluorocytidine
  modified_base 10: mod_base = OTHER; note = 2'-fluorocytidine
  modified_base 11: mod_base = OTHER; note = 2'-fluorouridine
  modified_base 12: mod_base = um
  modified_base 13: mod_base = cm
  modified_base 14: mod_base = um
  modified_base 15: mod_base = um
  modified_base 16: mod_base = cm
  modified_base 17: mod_base = um
  modified_base 18: mod_base = um
  modified_base 19: mod_base = um
  modified_base 20: mod_base = gm
  modified_base 21: mod_base = OTHER; note = 2'-O-methyladenosine
  source 1..21: mol_type = other RNA
gacacatcccttcttctttga

SEQ ID NO: 845 - RNA, 21 nt, synthetic construct
  modified_base 1: mod_base = cm
  modified_base 2: mod_base = cm
  modified_base 3: mod_base = um
  modified_base 4: mod_base = um
  modified_base 5: mod_base = um
  modified_base 6: mod_base = OTHER; note = 2'-O-methyladenosine
  modified_base 7: mod_base = cm
  modified_base 8: mod_base = OTHER; note = 2'-O-methyladenosine
  modified_base 9: mod_base = OTHER; note = 2'-fluorocytidine
  modified_base 10: mod_base = OTHER; note = 2'-fluorocytidine
  modified_base 11: mod_base = OTHER; note = 2'-fluoroguanosine
  modified_base 12: mod_base = gm
  modified_base 13: mod_base = OTHER; note = 2'-O-methyladenosine
  modified_base 14: mod_base = um
  modified_base 15: mod_base = um
  modified_base 16: mod_base = um
  modified_base 17: mod_base = cm
  modified_base 18: mod_base = gm
  modified_base 19: mod_base = OTHER; note = 2'-O-methyladenosine
  modified_base 20: mod_base = OTHER; note = 2'-O-methyladenosine
  modified_base 21: mod_base = OTHER; note = 2'-O-methyladenosine
  source 1..21: mol_type = other RNA
cctttacaccggatttcgaaa

SEQ ID NO: 846 - RNA, 21 nt, synthetic construct
  modified_base 1: mod_base = um
  modified_base 2: mod_base = OTHER; note = 2'-O-methyladenosine
  modified_base 3: mod_base = cm
  modified_base 4: mod_base = OTHER; note = 2'-O-methyladenosine
  modified_base 5: mod_base = cm
  modified_base 6: mod_base = cm
  modified_base 7: mod_base = gm
  modified_base 8: mod_base = gm
  modified_base 9: mod_base = OTHER; note = 2'-fluoroadenosine
  modified_base 10: mod_base = OTHER; note = 2'-fluorouridine
  modified_base 11: mod_base = OTHER; note = 2'-fluorouridine
  modified_base 12: mod_base = um
  modified_base 13: mod_base = cm
  modified_base 14: mod_base = gm
  modified_base 15: mod_base = OTHER; note = 2'-O-methyladenosine
  modified_base 16: mod_base = OTHER; note = 2'-O-methyladenosine
  modified_base 17: mod_base = gm
  modified_base 18: mod_base = OTHER; note = 2'-O-methylinosine
  modified_base 19: mod_base = um
  modified_base 20: mod_base = gm
  modified_base 21: mod_base = OTHER; note = 2'-O-methyladenosine
  source 1..21: mol_type = other RNA
tacaccggatttcgaagntga

SEQ ID NO: 847 - RNA, 21 nt, synthetic construct
  modified_base 1: mod_base = cm
  modified_base 2: mod_base = OTHER; note = 2'-O-methyladenosine
  modified_base 3: mod_base = cm
  modified_base 4: mod_base = cm
  modified_base 5: mod_base = gm
  modified_base 6: mod_base = OTHER; note = 2'-O-methyladenosine
  modified_base 7: mod_base = cm
  modified_base 8: mod_base = OTHER; note = 2'-O-methyladenosine
  modified_base 9: mod_base = OTHER; note = 2'-fluorocytidine
  modified_base 10: mod_base = OTHER; note = 2'-fluoroadenosine
  modified_base 11: mod_base = OTHER; note = 2'-fluorouridine
  modified_base 12: mod_base = gm
  modified_base 13: mod_base = cm
  modified_base 14: mod_base = OTHER; note = 2'-O-methyladenosine
  modified_base 15: mod_base = OTHER; note = 2'-O-methyladenosine
  modified_base 16: mod_base = cm
  modified_base 17: mod_base = um
  modified_base 18: mod_base = um
  modified_base 19: mod_base = cm
  modified_base 20: mod_base = OTHER; note = 2'-O-methylinosine
  modified_base 21: mod_base = OTHER; note = 2'-O-methyladenosine
  source 1..21: mol_type = other RNA
caccgacacatgcaacttcna

SEQ ID NO: 848 - RNA, 21 nt, synthetic construct
  modified_base 1: mod_base = cm
  modified_base 2: mod_base = cm
  modified_base 3: mod_base = gm
  modified_base 4: mod_base = OTHER; note = 2'-O-methyladenosine
  modified_base 5: mod_base = cm
  modified_base 6: mod_base = OTHER; note = 2'-O-methyladenosine
  modified_base 7: mod_base = cm
  modified_base 8: mod_base = OTHER; note = 2'-O-methyladenosine
  modified_base 9: mod_base = OTHER; note = 2'-fluorouridine
  modified_base 10: mod_base = OTHER; note = 2'-fluoroguanosine
  modified_base 11: mod_base = OTHER; note = 2'-fluorocytidine
  modified_base 12: mod_base = OTHER; note = 2'-O-methyladenosine
  modified_base 13: mod_base = OTHER; note = 2'-O-methyladenosine
  modified_base 14: mod_base = cm
  modified_base 15: mod_base = um
  modified_base 16: mod_base = um
  modified_base 17: mod_base = cm
  modified_base 18: mod_base = OTHER; note = 2'-O-methylinosine
  modified_base 19: mod_base = OTHER; note = 2'-O-methyladenosine
  modified_base 20: mod_base = cm
  modified_base 21: mod_base = um
  source 1..21: mol_type = other RNA
ccgacacatgcaacttcnact

SEQ ID NO: 849 - RNA, 21 nt, synthetic construct
  modified_base 1: mod_base = OTHER; note = 2'-O-methyladenosine
  modified_base 2: mod_base = cm
  modified_base 3: mod_base = OTHER; note = 2'-O-methyladenosine
  modified_base 4: mod_base = um
  modified_base 5: mod_base = gm
  modified_base 6: mod_base = cm
  modified_base 7: mod_base = OTHER; note = 2'-O-methyladenosine
  modified_base 8: mod_base = OTHER; note = 2'-O-methyladenosine
  modified_base 9: mod_base = OTHER; note = 2'-fluorocytidine
  modified_base 10: mod_base = OTHER; note = 2'-fluorouridine
  modified_base 11: mod_base = OTHER; note = 2'-fluorouridine
  modified_base 12: mod_base = cm
  modified_base 13: mod_base = gm
  modified_base 14: mod_base = OTHER; note = 2'-O-methyladenosine
  modified_base 15: mod_base = cm
  modified_base 16: mod_base = um
  modified_base 17: mod_base = um
  modified_base 18: mod_base = OTHER; note = 2'-O-methylinosine
  modified_base 19: mod_base = gm
  modified_base 20: mod_base = um
  modified_base 21: mod_base = OTHER; note = 2'-O-methyladenosine
  source 1..21: mol_type = other RNA
acatgcaacttcgacttngta

SEQ ID NO: 850 - RNA, 21 nt, synthetic construct
  modified_base 1: mod_base = cm
  modified_base 2: mod_base = cm
  modified_base 3: mod_base = um
  modified_base 4: mod_base = gm
  modified_base 5: mod_base = gm
  modified_base 6: mod_base = um
  modified_base 7: mod_base = cm
  modified_base 8: mod_base = OTHER; note = 2'-O-methyladenosine
  modified_base 9: mod_base = OTHER; note = 2'-fluorouridine
  modified_base 10: mod_base = gm
  modified_base 11: mod_base = OTHER; note = 2'-fluoroguanosine
  modified_base 12: mod_base = OTHER; note = 2'-fluoroadenosine
  modified_base 13: mod_base = gm
  modified_base 14: mod_base = um
  modified_base 15: mod_base = OTHER; note = 2'-O-methyladenosine
  modified_base 16: mod_base = um
  modified_base 17: mod_base = um
  modified_base 18: mod_base = OTHER; note = 2'-O-methyladenosine
  modified_base 19: mod_base = cm
  modified_base 20: mod_base = gm
  modified_base 21: mod_base = um
  source 1..21: mol_type = other RNA
cctggtcatggagtattacgt

SEQ ID NO: 851 - RNA, 22 nt, synthetic construct
  modified_base 1: mod_base = cm
  modified_base 2: mod_base = cm
  modified_base 3: mod_base = um
  modified_base 4: mod_base = cm
  modified_base 5: mod_base = gm
  modified_base 6: mod_base = gm
  modified_base 7: mod_base = um
  modified_base 8: mod_base = OTHER; note = 2'-O-methyladenosine
  modified_base 9: mod_base = OTHER; note = 2'-fluorouridine
  modified_base 10: mod_base = OTHER; note = 2'-fluorouridine
  modified_base 11: mod_base = OTHER; note = 2'-fluorouridine
  modified_base 12: mod_base = OTHER; note = 2'-O-methyladenosine
  modified_base 13: mod_base = um
  modified_base 14: mod_base = um
  modified_base 15: mod_base = gm
  modified_base 16: mod_base = um
  modified_base 17: mod_base = um
  modified_base 18: mod_base = um
  modified_base 19: mod_base = gm
  modified_base 20: mod_base = um
  modified_base 21: mod_base = OTHER; note = 2'-O-methyladenosine
  modified_base 22: mod_base = OTHER; note = 2 -deoxythymidine
  source 1..22: mol_type = other RNA
cctcggtatttattgtttgtat

SEQ ID NO: 852 - RNA, 22 nt, synthetic construct
  modified_base 1: mod_base = cm
  modified_base 2: mod_base = cm
  modified_base 3: mod_base = um
  modified_base 4: mod_base = cm
  modified_base 5: mod_base = gm
  modified_base 6: mod_base = gm
  modified_base 7: mod_base = um
  modified_base 8: mod_base = OTHER; note = 2'-O-methyladenosine
  modified_base 9: mod_base = OTHER; note = 2'-fluorouridine
  modified_base 10: mod_base = OTHER; note = 2'-fluorouridine
  modified_base 11: mod_base = OTHER; note = 2'-fluorouridine
  modified_base 12: mod_base = OTHER; note = 2'-O-methyladenosine
  modified_base 13: mod_base = um
  modified_base 14: mod_base = um
  modified_base 15: mod_base = gm
  modified_base 16: mod_base = um
  modified_base 17: mod_base = cm
  modified_base 18: mod_base = um
  modified_base 19: mod_base = gm
  modified_base 20: mod_base = um
  modified_base 21: mod_base = OTHER; note = 2'-O-methyladenosine
  modified_base 22: mod_base = OTHER; note = 2 -deoxythymidine
  source 1..22: mol_type = other RNA
cctcggtatttattgtctgtat

SEQ ID NO: 853 - RNA, 22 nt, synthetic construct
  modified_base 1: mod_base = cm
  modified_base 2: mod_base = cm
  modified_base 3: mod_base = um
  modified_base 4: mod_base = cm
  modified_base 5: mod_base = gm
  modified_base 6: mod_base = gm
  modified_base 7: mod_base = um
  modified_base 8: mod_base = OTHER; note = 2'-O-methyladenosine
  modified_base 9: mod_base = OTHER; note = 2'-fluorouridine
  modified_base 10: mod_base = OTHER; note = 2'-fluorouridine
  modified_base 11: mod_base = OTHER; note = 2'-fluorouridine
  modified_base 12: mod_base = OTHER; note = 2'-O-methyladenosine
  modified_base 13: mod_base = um
  modified_base 14: mod_base = um
  modified_base 15: mod_base = gm
  modified_base 16: mod_base = um
  modified_base 17: mod_base = cm
  modified_base 18: mod_base = um
  modified_base 19: mod_base = OTHER; note = 2'-O-methylinosine
  modified_base 20: mod_base = um
  modified_base 21: mod_base = OTHER; note = 2'-O-methyladenosine
  modified_base 22: mod_base = OTHER; note = 2 -deoxythymidine
  source 1..22: mol_type = other RNA
cctcggtatttattgtctntat

SEQ ID NO: 854 - RNA, 21 nt, synthetic construct
  modified_base 1: mod_base = cm
  modified_base 2: mod_base = cm
  modified_base 3: mod_base = um
  modified_base 4: mod_base = gm
  modified_base 5: mod_base = gm
  modified_base 6: mod_base = um
  modified_base 7: mod_base = cm
  modified_base 8: mod_base = OTHER; note = 2'-O-methyladenosine
  modified_base 9: mod_base = OTHER; note = 2'-fluorouridine
  modified_base 10: mod_base = gm
  modified_base 11: mod_base = OTHER; note = 2'-fluoroguanosine
  modified_base 12: mod_base = OTHER; note = 2'-fluoroadenosine
  modified_base 13: mod_base = gm
  modified_base 14: mod_base = um
  modified_base 15: mod_base = OTHER; note = 2'-O-methyladenosine
  modified_base 16: mod_base = um
  modified_base 17: mod_base = um
  modified_base 18: mod_base = OTHER; note = 2'-O-methyladenosine
  modified_base 19: mod_base = cm
  modified_base 20: mod_base = gm
  modified_base 21: mod_base = OTHER; note = 2'-O-methyladenosine
  source 1..21: mol_type = other RNA
cctggtcatggagtattacga

SEQ ID NO: 855 - RNA, 19 nt, synthetic construct
  modified_base 1: mod_base = cm
  modified_base 1^2: mod_base = OTHER; note = phosphorothioate linkage
  modified_base 2: mod_base = cm
  modified_base 2^3: mod_base = OTHER; note = phosphorothioate linkage
  modified_base 3: mod_base = cm
  modified_base 4: mod_base = um
  modified_base 5: mod_base = OTHER; note = 2'-O-methyladenosine
  modified_base 6: mod_base = gm
  modified_base 7: mod_base = OTHER; note = 2'-fluoroadenosine
  modified_base 8: mod_base = OTHER; note = 2'-fluoroadenosine
  modified_base 9: mod_base = OTHER; note = 2'-fluorocytidine
  modified_base 10: mod_base = um
  modified_base 11: mod_base = gm
  modified_base 12: mod_base = um
  modified_base 13: mod_base = cm
  modified_base 14: mod_base = um
  modified_base 15: mod_base = um
  modified_base 16: mod_base = cm
  modified_base 17: mod_base = gm
  modified_base 17^18: mod_base = OTHER; note = phosphorothioate linkage
  modified_base 18: mod_base = OTHER; note = 2'-O-methyladenosine
  modified_base 18^19: mod_base = OTHER; note = phosphorothioate linkage
  modified_base 19: mod_base = OTHER; note = 2'-O-methyladenosine
  source 1..19: mol_type = other RNA
ccctagaactgtcttcgaa

SEQ ID NO: 856 - RNA, 21 nt, synthetic construct
  modified_base 1: mod_base = um
  modified_base 2: mod_base = um
  modified_base 3: mod_base = cm
  modified_base 4: mod_base = cm
  modified_base 5: mod_base = um
  modified_base 6: mod_base = cm
  modified_base 7: mod_base = gm
  modified_base 8: mod_base = gm
  modified_base 9: mod_base = OTHER; note = 2'-fluorouridine
  modified_base 10: mod_base = OTHER; note = 2'-O-methyladenosine
  modified_base 11: mod_base = OTHER; note = 2'-fluorouridine
  modified_base 12: mod_base = OTHER; note = 2'-fluorouridine
  modified_base 13: mod_base = um
  modified_base 14: mod_base = OTHER; note = 2'-O-methyladenosine
  modified_base 15: mod_base = um
  modified_base 16: mod_base = um
  modified_base 17: mod_base = gm
  modified_base 18: mod_base = um
  modified_base 19: mod_base = cm
  modified_base 20: mod_base = um
  modified_base 21: mod_base = OTHER; note = 2'-O-methyladenosine
  source 1..21: mol_type = other RNA
ttcctcggtatttattgtcta

SEQ ID NO: 857 - RNA, 21 nt, synthetic construct
  modified_base 1: mod_base = cm
  modified_base 2: mod_base = OTHER; note = 2'-O-methyladenosine
  modified_base 3: mod_base = cm
  modified_base 4: mod_base = cm
  modified_base 5: mod_base = gm
  modified_base 6: mod_base = OTHER; note = 2'-O-methyladenosine
  modified_base 7: mod_base = cm
  modified_base 8: mod_base = OTHER; note = 2'-O-methyladenosine
  modified_base 9: mod_base = OTHER; note = 2'-fluorocytidine
  modified_base 10: mod_base = OTHER; note = 2'-O-methyladenosine
  modified_base 11: mod_base = OTHER; note = 2'-fluorouridine
  modified_base 12: mod_base = gm
  modified_base 13: mod_base = OTHER; note = 2'-fluorocytidine
  modified_base 14: mod_base = OTHER; note = 2'-O-methyladenosine
  modified_base 15: mod_base = OTHER; note = 2'-O-methyladenosine
  modified_base 16: mod_base = cm
  modified_base 17: mod_base = um
  modified_base 18: mod_base = um
  modified_base 19: mod_base = cm
  modified_base 20: mod_base = OTHER; note = 2'-O-methylinosine
  modified_base 21: mod_base = OTHER; note = 2'-O-methyladenosine
  source 1..21: mol_type = other RNA
caccgacacatgcaacttcna

SEQ ID NO: 858 - RNA, 22 nt, synthetic construct
  modified_base 1: mod_base = gm
  modified_base 2: mod_base = OTHER; note = 2'-O-methyladenosine
  modified_base 3: mod_base = cm
  modified_base 4: mod_base = cm
  modified_base 5: mod_base = cm
  modified_base 6: mod_base = um
  modified_base 7: mod_base = OTHER; note = 2'-O-methyladenosine
  modified_base 8: mod_base = gm
  modified_base 9: mod_base = OTHER; note = 2'-fluoroadenosine
  modified_base 10: mod_base = OTHER; note = 2'-fluoroadenosine
  modified_base 11: mod_base = OTHER; note = 2'-fluorocytidine
  modified_base 12: mod_base = um
  modified_base 13: mod_base = gm
  modified_base 14: mod_base = um
  modified_base 15: mod_base = cm
  modified_base 16: mod_base = um
  modified_base 17: mod_base = um
  modified_base 18: mod_base = cm
  modified_base 19: mod_base = OTHER; note = 2'-O-methylinosine
  modified_base 20: mod_base = OTHER; note = 2'-O-methyladenosine
  modified_base 21: mod_base = OTHER; note = 2'-O-methyladenosine
  modified_base 22: mod_base = OTHER; note = 2 -deoxythymidine
  source 1..22: mol_type = other RNA
gaccctagaactgtcttcnaat

SEQ ID NO: 859 - RNA, 22 nt, synthetic construct
  modified_base 1: mod_base = gm
  modified_base 2: mod_base = OTHER; note = 2'-O-methyladenosine
  modified_base 3: mod_base = OTHER; note = 2'-O-methyladenosine
  modified_base 4: mod_base = cm
  modified_base 5: mod_base = cm
  modified_base 6: mod_base = cm
  modified_base 7: mod_base = um
  modified_base 8: mod_base = OTHER; note = 2'-O-methyladenosine
  modified_base 9: mod_base = OTHER; note = 2'-fluoroguanosine
  modified_base 10: mod_base = OTHER; note = 2'-fluoroadenosine
  modified_base 11: mod_base = OTHER; note = 2'-fluoroadenosine
  modified_base 12: mod_base = cm
  modified_base 13: mod_base = um
  modified_base 14: mod_base = gm
  modified_base 15: mod_base = um
  modified_base 16: mod_base = cm
  modified_base 17: mod_base = um
  modified_base 18: mod_base = um
  modified_base 19: mod_base = cm
  modified_base 20: mod_base = OTHER; note = 2'-O-methylinosine
  modified_base 21: mod_base = OTHER; note = 2'-O-methyladenosine
  modified_base 22: mod_base = OTHER; note = 2 -deoxythymidine
  source 1..22: mol_type = other RNA
gaaccctagaactgtcttcnat

SEQ ID NO: 860 - RNA, 21 nt, synthetic construct
  modified_base 1: mod_base = um
  modified_base 2: mod_base = gm
  modified_base 3: mod_base = gm
  modified_base 4: mod_base = cm
  modified_base 5: mod_base = OTHER; note = 2'-O-methyladenosine
  modified_base 6: mod_base = OTHER; note = 2'-O-methyladenosine
  modified_base 7: mod_base = gm
  modified_base 8: mod_base = OTHER; note = 2'-O-methyladenosine
  modified_base 9: mod_base = OTHER; note = 2'-fluorouridine
  modified_base 10: mod_base = cm
  modified_base 11: mod_base = OTHER; note = 2'-fluoroguanosine
  modified_base 12: mod_base = OTHER; note = 2'-fluorouridine
  modified_base 13: mod_base = cm
  modified_base 14: mod_base = cm
  modified_base 15: mod_base = OTHER; note = 2'-O-methyladenosine
  modified_base 16: mod_base = cm
  modified_base 17: mod_base = um
  modified_base 18: mod_base = OTHER; note = 2'-O-methyladenosine
  modified_base 19: mod_base = cm
  modified_base 20: mod_base = OTHER; note = 2'-O-methyladenosine
  modified_base 21: mod_base = OTHER; note = 2'-O-methyladenosine
  source 1..21: mol_type = other RNA
tggcaagatcgtccactacaa

SEQ ID NO: 861 - RNA, 21 nt, synthetic construct
  modified_base 1: mod_base = um
  modified_base 2: mod_base = gm
  modified_base 3: mod_base = gm
  modified_base 4: mod_base = cm
  modified_base 5: mod_base = OTHER; note = 2'-O-methyladenosine
  modified_base 6: mod_base = OTHER; note = 2'-O-methyladenosine
  modified_base 7: mod_base = gm
  modified_base 8: mod_base = OTHER; note = 2'-O-methyladenosine
  modified_base 9: mod_base = OTHER; note = 2'-fluorouridine
  modified_base 10: mod_base = cm
  modified_base 11: mod_base = OTHER; note = 2'-fluoroguanosine
  modified_base 12: mod_base = um
  modified_base 13: mod_base = OTHER; note = 2'-fluorocytidine
  modified_base 14: mod_base = cm
  modified_base 15: mod_base = OTHER; note = 2'-O-methyladenosine
  modified_base 16: mod_base = cm
  modified_base 17: mod_base = um
  modified_base 18: mod_base = OTHER; note = 2'-O-methyladenosine
  modified_base 19: mod_base = cm
  modified_base 20: mod_base = OTHER; note = 2'-O-methyladenosine
  modified_base 21: mod_base = OTHER; note = 2'-O-methyladenosine
  source 1..21: mol_type = other RNA
tggcaagatcgtccactacaa

SEQ ID NO: 862 - RNA, 22 nt, synthetic construct
  modified_base 1: mod_base = cm
  modified_base 2: mod_base = cm
  modified_base 3: mod_base = um
  modified_base 4: mod_base = gm
  modified_base 5: mod_base = gm
  modified_base 6: mod_base = um
  modified_base 7: mod_base = cm
  modified_base 8: mod_base = OTHER; note = 2'-O-methyladenosine
  modified_base 9: mod_base = OTHER; note = 2'-fluorouridine
  modified_base 10: mod_base = gm
  modified_base 11: mod_base = OTHER; note = 2'-fluoroguanosine
  modified_base 12: mod_base = OTHER; note = 2'-fluoroadenosine
  modified_base 13: mod_base = gm
  modified_base 14: mod_base = um
  modified_base 15: mod_base = OTHER; note = 2'-O-methyladenosine
  modified_base 16: mod_base = um
  modified_base 17: mod_base = um
  modified_base 18: mod_base = OTHER; note = 2'-O-methyladenosine
  modified_base 19: mod_base = cm
  modified_base 20: mod_base = gm
  modified_base 21: mod_base = OTHER; note = 2'-O-methyladenosine
  modified_base 22: mod_base = OTHER; note = 2 -deoxythymidine
  source 1..22: mol_type = other RNA
cctggtcatggagtattacgat

SEQ ID NO: 863 - RNA, 20 nt, synthetic construct
  modified_base 1: mod_base = cm
  modified_base 1^2: mod_base = OTHER; note = phosphorothioate linkage
  modified_base 2: mod_base = cm
  modified_base 2^3: mod_base = OTHER; note = phosphorothioate linkage
  modified_base 3: mod_base = cm
  modified_base 4: mod_base = um
  modified_base 5: mod_base = OTHER; note = 2'-O-methyladenosine
  modified_base 6: mod_base = gm
  modified_base 7: mod_base = OTHER; note = 2'-fluoroadenosine
  modified_base 8: mod_base = OTHER; note = 2'-fluoroadenosine
  modified_base 9: mod_base = OTHER; note = 2'-fluorocytidine
  modified_base 10: mod_base = um
  modified_base 11: mod_base = gm
  modified_base 12: mod_base = um
  modified_base 13: mod_base = cm
  modified_base 14: mod_base = um
  modified_base 15: mod_base = um
  modified_base 16: mod_base = cm
  modified_base 17: mod_base = gm
  modified_base 17^18: mod_base = OTHER; note = phosphorothioate linkage
  modified_base 18: mod_base = OTHER; note = 2'-O-methyladenosine
  modified_base 18^19: mod_base = OTHER; note = phosphorothioate linkage
  modified_base 19: mod_base = OTHER; note = 2'-O-methyladenosine
  modified_base 20: mod_base = OTHER; note = 2 -deoxythymidine
  source 1..20: mol_type = other RNA
ccctagaactgtcttcgaat

SEQ ID NO: 864 - RNA, 22 nt, synthetic construct
  modified_base 1: mod_base = cm
  modified_base 2: mod_base = cm
  modified_base 3: mod_base = um
  modified_base 4: mod_base = cm
  modified_base 5: mod_base = gm
  modified_base 6: mod_base = gm
  modified_base 7: mod_base = um
  modified_base 8: mod_base = OTHER; note = 2'-O-methyladenosine
  modified_base 9: mod_base = OTHER; note = 2'-fluorouridine
  modified_base 10: mod_base = um
  modified_base 11: mod_base = OTHER; note = 2'-fluorouridine
  modified_base 12: mod_base = OTHER; note = 2'-O-methyladenosine
  modified_base 13: mod_base = OTHER; note = 2'-fluorouridine
  modified_base 14: mod_base = um
  modified_base 15: mod_base = gm
  modified_base 16: mod_base = um
  modified_base 17: mod_base = cm
  modified_base 18: mod_base = um
  modified_base 19: mod_base = gm
  modified_base 20: mod_base = um
  modified_base 21: mod_base = OTHER; note = 2'-O-methyladenosine
  modified_base 22: mod_base = OTHER; note = 2 -deoxythymidine
  source 1..22: mol_type = other RNA
cctcggtatttattgtctgtat

SEQ ID NO: 865 - RNA, 22 nt, synthetic construct
  modified_base 1: mod_base = cm
  modified_base 2: mod_base = cm
  modified_base 3: mod_base = um
  modified_base 4: mod_base = cm
  modified_base 5: mod_base = gm
  modified_base 6: mod_base = gm
  modified_base 7: mod_base = um
  modified_base 8: mod_base = OTHER; note = 2'-O-methyladenosine
  modified_base 9: mod_base = OTHER; note = 2'-fluorouridine
  modified_base 10: mod_base = um
  modified_base 11: mod_base = OTHER; note = 2'-fluorouridine
  modified_base 12: mod_base = OTHER; note = 2'-fluoroadenosine
  modified_base 13: mod_base = um
  modified_base 14: mod_base = um
  modified_base 15: mod_base = gm
  modified_base 16: mod_base = um
  modified_base 17: mod_base = cm
  modified_base 18: mod_base = um
  modified_base 19: mod_base = gm
  modified_base 20: mod_base = um
  modified_base 21: mod_base = OTHER; note = 2'-O-methyladenosine
  modified_base 22: mod_base = OTHER; note = 2 -deoxythymidine
  source 1..22: mol_type = other RNA
cctcggtatttattgtctgtat

SEQ ID NO: 866 - RNA, 21 nt, synthetic construct
  modified_base 1: mod_base = um
  modified_base 2: mod_base = um
  modified_base 3: mod_base = cm
  modified_base 4: mod_base = cm
  modified_base 5: mod_base = um
  modified_base 6: mod_base = cm
  modified_base 7: mod_base = gm
  modified_base 8: mod_base = gm
  modified_base 9: mod_base = OTHER; note = 2'-fluorouridine
  modified_base 10: mod_base = OTHER; note = 2'-O-methyladenosine
  modified_base 11: mod_base = OTHER; note = 2'-fluorouridine
  modified_base 12: mod_base = OTHER; note = 2'-fluorouridine
  modified_base 13: mod_base = um
  modified_base 14: mod_base = OTHER; note = 2'-O-methyladenosine
  modified_base 15: mod_base = um
  modified_base 16: mod_base = um
  modified_base 17: mod_base = gm
  modified_base 18: mod_base = um
  modified_base 19: mod_base = cm
  modified_base 20: mod_base = um
  modified_base 21: mod_base = OTHER; note = 2'-O-methyladenosine
  source 1..21: mol_type = other RNA
ttcctcggtatttattgtcta

SEQ ID NO: 867 - RNA, 21 nt, synthetic construct
  modified_base 1: mod_base = cm
  modified_base 2: mod_base = cm
  modified_base 3: mod_base = um
  modified_base 4: mod_base = gm
  modified_base 5: mod_base = gm
  modified_base 6: mod_base = um
  modified_base 7: mod_base = cm
  modified_base 8: mod_base = OTHER; note = 2'-O-methyladenosine
  modified_base 9: mod_base = OTHER; note = 2'-fluorouridine
  modified_base 10: mod_base = gm
  modified_base 11: mod_base = OTHER; note = 2'-fluoroguanosine
  modified_base 12: mod_base = OTHER; note = 2'-fluoroadenosine
  modified_base 13: mod_base = gm
  modified_base 14: mod_base = um
  modified_base 15: mod_base = OTHER; note = 2'-O-methyladenosine
  modified_base 16: mod_base = um
  modified_base 17: mod_base = um
  modified_base 18: mod_base = OTHER; note = 2'-O-methyladenosine
  modified_base 19: mod_base = cm
  modified_base 20: mod_base = gm
  modified_base 21: mod_base = OTHER; note = 2'-O-methyladenosine
  source 1..21: mol_type = other RNA
cctggtcatggagtattacga

SEQ ID NO: 868 - RNA, 22 nt, synthetic construct
  modified_base 1: mod_base = um
  modified_base 2: mod_base = um
  modified_base 3: mod_base = cm
  modified_base 4: mod_base = cm
  modified_base 5: mod_base = um
  modified_base 6: mod_base = cm
  modified_base 7: mod_base = gm
  modified_base 8: mod_base = gm
  modified_base 9: mod_base = OTHER; note = 2'-fluorouridine
  modified_base 10: mod_base = OTHER; note = 2'-O-methyladenosine
  modified_base 11: mod_base = OTHER; note = 2'-fluorouridine
  modified_base 12: mod_base = OTHER; note = 2'-fluorouridine
  modified_base 13: mod_base = um
  modified_base 14: mod_base = OTHER; note = 2'-O-methyladenosine
  modified_base 15: mod_base = um
  modified_base 16: mod_base = um
  modified_base 17: mod_base = gm
  modified_base 18: mod_base = um
  modified_base 19: mod_base = cm
  modified_base 20: mod_base = um
  modified_base 21: mod_base = OTHER; note = 2'-O-propargyladenosine
  source 1..22: mol_type = other RNA
ttcctcggtatttattgtctaa

SEQ ID NO: 869 - RNA, 22 nt, synthetic construct
  modified_base 1: mod_base = um
  modified_base 2: mod_base = um
  modified_base 3: mod_base = cm
  modified_base 4: mod_base = cm
  modified_base 5: mod_base = um
  modified_base 6: mod_base = cm
  modified_base 7: mod_base = gm
  modified_base 8: mod_base = gm
  modified_base 9: mod_base = OTHER; note = 2'-fluorouridine
  modified_base 10: mod_base = OTHER; note = 2'-O-methyladenosine
  modified_base 11: mod_base = OTHER; note = 2'-fluorouridine
  modified_base 12: mod_base = OTHER; note = 2'-fluorouridine
  modified_base 13: mod_base = um
  modified_base 14: mod_base = OTHER; note = 2'-O-methyladenosine
  modified_base 15: mod_base = um
  modified_base 16: mod_base = um
  modified_base 17: mod_base = gm
  modified_base 18: mod_base = um
  modified_base 19: mod_base = cm
  modified_base 20: mod_base = um
  modified_base 20^21: mod_base = OTHER; note = phosphorothioate linkage
  modified_base 21: mod_base = OTHER; note = 2'-O-propargyladenosine
  source 1..22: mol_type = other RNA
ttcctcggtatttattgtctaa

SEQ ID NO: 870 - RNA, 22 nt, synthetic construct
  modified_base 1: mod_base = um
  modified_base 2: mod_base = um
  modified_base 3: mod_base = cm
  modified_base 4: mod_base = cm
  modified_base 5: mod_base = um
  modified_base 6: mod_base = cm
  modified_base 7: mod_base = gm
  modified_base 8: mod_base = gm
  modified_base 9: mod_base = OTHER; note = 2'-fluorouridine
  modified_base 10: mod_base = OTHER; note = 2'-O-methyladenosine
  modified_base 11: mod_base = OTHER; note = 2'-fluorouridine
  modified_base 12: mod_base = OTHER; note = 2'-fluorouridine
  modified_base 13: mod_base = um
  modified_base 14: mod_base = OTHER; note = 2'-O-methyladenosine
  modified_base 15: mod_base = um
  modified_base 16: mod_base = um
  modified_base 17: mod_base = gm
  modified_base 18: mod_base = um
  modified_base 19: mod_base = cm
  modified_base 20: mod_base = um
  modified_base 21: mod_base = OTHER; note = 2'-O-methyladenosine
  modified_base 21^22: mod_base = OTHER; note = phosphorothioate linkage
  modified_base 22: mod_base = OTHER; note = 2 -deoxythymidine
  source 1..22: mol_type = other RNA
ttcctcggtatttattgtctat

SEQ ID NO: 871 - RNA, 22 nt, synthetic construct
  modified_base 1: mod_base = cm
  modified_base 2: mod_base = cm
  modified_base 3: mod_base = um
  modified_base 4: mod_base = gm
  modified_base 5: mod_base = gm
  modified_base 6: mod_base = um
  modified_base 7: mod_base = cm
  modified_base 8: mod_base = OTHER; note = 2'-O-methyladenosine
  modified_base 9: mod_base = OTHER; note = 2'-fluorouridine
  modified_base 10: mod_base = gm
  modified_base 11: mod_base = OTHER; note = 2'-fluoroguanosine
  modified_base 12: mod_base = OTHER; note = 2'-fluoroadenosine
  modified_base 13: mod_base = gm
  modified_base 14: mod_base = um
  modified_base 15: mod_base = OTHER; note = 2'-O-methyladenosine
  modified_base 16: mod_base = um
  modified_base 17: mod_base = um
  modified_base 18: mod_base = OTHER; note = 2'-O-methyladenosine
  modified_base 19: mod_base = cm
  modified_base 20: mod_base = gm
  modified_base 21: mod_base = OTHER; note = 2'-O-methyladenosine
  modified_base 22: mod_base = OTHER; note = 2 -deoxythymidine
  source 1..22: mol_type = other RNA
cctggtcatggagtattacgat

SEQ ID NO: 872 - RNA, 23 nt, synthetic construct
  modified_base 1: mod_base = cm
  modified_base 2: mod_base = cm
  modified_base 3: mod_base = um
  modified_base 4: mod_base = gm
  modified_base 5: mod_base = gm
  modified_base 6: mod_base = gm
  modified_base 7: mod_base = um
  modified_base 8: mod_base = cm
  modified_base 9: mod_base = OTHER; note = 2'-O-methyladenosine
  modified_base 10: mod_base = OTHER; note = 2'-fluorouridine
  modified_base 11: mod_base = gm
  modified_base 12: mod_base = OTHER; note = 2'-fluoroguanosine
  modified_base 13: mod_base = OTHER; note = 2'-fluoroadenosine
  modified_base 14: mod_base = gm
  modified_base 15: mod_base = um
  modified_base 16: mod_base = OTHER; note = 2'-O-methyladenosine
  modified_base 17: mod_base = um
  modified_base 18: mod_base = um
  modified_base 19: mod_base = OTHER; note = 2'-O-methyladenosine
  modified_base 20: mod_base = cm
  modified_base 21: mod_base = gm
  modified_base 22: mod_base = OTHER; note = 2'-O-methyladenosine
  modified_base 23: mod_base = OTHER; note = 2 -deoxythymidine
  source 1..23: mol_type = other RNA
cctgggtcatggagtattacgat

SEQ ID NO: 873 - RNA, 22 nt, synthetic construct
  modified_base 1: mod_base = cm
  modified_base 2: mod_base = cm
  modified_base 3: mod_base = um
  modified_base 4: mod_base = gm
  modified_base 5: mod_base = gm
  modified_base 6: mod_base = um
  modified_base 7: mod_base = cm
  modified_base 8: mod_base = OTHER; note = 2'-O-methyladenosine
  modified_base 9: mod_base = OTHER; note = 2'-fluorouridine
  modified_base 10: mod_base = gm
  modified_base 11: mod_base = OTHER; note = 2'-fluoroguanosine
  modified_base 12: mod_base = OTHER; note = 2'-fluoroadenosine
  modified_base 13: mod_base = gm
  modified_base 14: mod_base = um
  modified_base 15: mod_base = OTHER; note = 2'-O-methyladenosine
  modified_base 16: mod_base = um
  modified_base 17: mod_base = um
  modified_base 18: mod_base = OTHER; note = 2'-O-methyladenosine
  modified_base 19: mod_base = cm
  modified_base 20: mod_base = gm
  modified_base 21: mod_base = OTHER; note = 2'-O-methyladenosine
  modified_base 22: mod_base = OTHER; note = 2 -deoxythymidine
  source 1..22: mol_type = other RNA
cctggtcatggagtattacgat

SEQ ID NO: 874 - RNA, 21 nt, synthetic construct
  modified_base 1: mod_base = cm
  modified_base 2: mod_base = um
  modified_base 3: mod_base = gm
  modified_base 4: mod_base = gm
  modified_base 5: mod_base = um
  modified_base 6: mod_base = cm
  modified_base 7: mod_base = OTHER; note = 2'-O-methyladenosine
  modified_base 8: mod_base = OTHER; note = 2'-fluorouridine
  modified_base 9: mod_base = gm
  modified_base 10: mod_base = OTHER; note = 2'-fluoroguanosine
  modified_base 11: mod_base = OTHER; note = 2'-fluoroadenosine
  modified_base 12: mod_base = gm
  modified_base 13: mod_base = um
  modified_base 14: mod_base = OTHER; note = 2'-O-methyladenosine
  modified_base 15: mod_base = um
  modified_base 16: mod_base = um
  modified_base 17: mod_base = OTHER; note = 2'-O-methyladenosine
  modified_base 18: mod_base = cm
  modified_base 19: mod_base = gm
  modified_base 20: mod_base = OTHER; note = 2'-O-methyladenosine
  modified_base 21: mod_base = OTHER; note = 2 -deoxythymidine
  source 1..21: mol_type = other RNA
ctggtcatggagtattacgat

SEQ ID NO: 875 - RNA, 21 nt, synthetic construct
  modified_base 1: mod_base = cm
  modified_base 1^2: mod_base = OTHER; note = phosphorothioate linkage
  modified_base 2: mod_base = cm
  modified_base 3: mod_base = um
  modified_base 4: mod_base = gm
  modified_base 5: mod_base = gm
  modified_base 6: mod_base = um
  modified_base 7: mod_base = cm
  modified_base 8: mod_base = OTHER; note = 2'-O-methyladenosine
  modified_base 9: mod_base = OTHER; note = 2'-fluorouridine
  modified_base 10: mod_base = gm
  modified_base 11: mod_base = OTHER; note = 2'-fluoroguanosine
  modified_base 12: mod_base = OTHER; note = 2'-fluoroadenosine
  modified_base 13: mod_base = gm
  modified_base 14: mod_base = um
  modified_base 15: mod_base = OTHER; note = 2'-O-methyladenosine
  modified_base 16: mod_base = um
  modified_base 17: mod_base = um
  modified_base 18: mod_base = OTHER; note = 2'-O-methyladenosine
  modified_base 19: mod_base = cm
  modified_base 20: mod_base = gm
  modified_base 21: mod_base = OTHER; note = 2'-O-methyladenosine
  source 1..21: mol_type = other RNA
cctggtcatggagtattacga

SEQ ID NO: 876 - RNA, 21 nt, synthetic construct
  modified_base 1: mod_base = gm
  modified_base 2: mod_base = gm
  modified_base 3: mod_base = OTHER; note = 2'-O-methyladenosine
  modified_base 4: mod_base = um
  modified_base 5: mod_base = gm
  modified_base 6: mod_base = OTHER; note = 2'-O-methyladenosine
  modified_base 7: mod_base = OTHER; note = 2'-O-methyladenosine
  modified_base 8: mod_base = OTHER; note = 2'-O-methyladenosine
  modified_base 9: mod_base = OTHER; note = 2'-fluorocytidine
  modified_base 10: mod_base = OTHER; note = 2'-fluoroadenosine
  modified_base 11: mod_base = OTHER; note = 2'-fluoroguanosine
  modified_base 12: mod_base = cm
  modified_base 13: mod_base = um
  modified_base 14: mod_base = gm
  modified_base 15: mod_base = OTHER; note = 2'-O-methyladenosine
  modified_base 16: mod_base = OTHER; note = 2'-O-methyladenosine
  modified_base 17: mod_base = gm
  modified_base 18: mod_base = um
  modified_base 19: mod_base = OTHER; note = 2'-O-methylinosine
  modified_base 20: mod_base = gm
  modified_base 21: mod_base = OTHER; note = 2'-O-methyladenosine
  source 1..21: mol_type = other RNA
ggatgaaacagctgaagtnga

SEQ ID NO: 877 - RNA, 21 nt, synthetic construct
  modified_base 1: mod_base = um
  modified_base 2: mod_base = cm
  modified_base 3: mod_base = cm
  modified_base 4: mod_base = cm
  modified_base 5: mod_base = um
  modified_base 6: mod_base = gm
  modified_base 7: mod_base = OTHER; note = 2'-O-methyladenosine
  modified_base 8: mod_base = OTHER; note = 2'-O-methyladenosine
  modified_base 9: mod_base = OTHER; note = 2'-fluorocytidine
  modified_base 10: mod_base = OTHER; note = 2'-fluorocytidine
  modified_base 11: mod_base = OTHER; note = 2'-fluorocytidine
  modified_base 12: mod_base = um
  modified_base 13: mod_base = OTHER; note = 2'-O-methyladenosine
  modified_base 14: mod_base = gm
  modified_base 15: mod_base = OTHER; note = 2'-O-methyladenosine
  modified_base 16: mod_base = OTHER; note = 2'-O-methyladenosine
  modified_base 17: mod_base = cm
  modified_base 18: mod_base = um
  modified_base 19: mod_base = gm
  modified_base 20: mod_base = um
  modified_base 21: mod_base = OTHER; note = 2'-O-methyladenosine
  source 1..21: mol_type = other RNA
tccctgaaccctagaactgta

SEQ ID NO: 878 - RNA, 21 nt, synthetic construct
  modified_base 1: mod_base = gm
  modified_base 2: mod_base = OTHER; note = 2'-O-methyladenosine
  modified_base 3: mod_base = OTHER; note = 2'-O-methyladenosine
  modified_base 4: mod_base = cm
  modified_base 5: mod_base = cm
  modified_base 6: mod_base = cm
  modified_base 7: mod_base = um
  modified_base 8: mod_base = OTHER; note = 2'-O-methyladenosine
  modified_base 9: mod_base = OTHER; note = 2'-fluoroguanosine
  modified_base 10: mod_base = OTHER; note = 2'-fluoroadenosine
  modified_base 11: mod_base = OTHER; note = 2'-fluoroadenosine
  modified_base 12: mod_base = cm
  modified_base 13: mod_base = um
  modified_base 14: mod_base = gm
  modified_base 15: mod_base = um
  modified_base 16: mod_base = cm
  modified_base 17: mod_base = um
  modified_base 18: mod_base = um
  modified_base 19: mod_base = cm
  modified_base 20: mod_base = OTHER; note = 2'-O-methylinosine
  modified_base 21: mod_base = OTHER; note = 2'-O-methyladenosine
  source 1..21: mol_type = other RNA
gaaccctagaactgtcttcna

SEQ ID NO: 879 - RNA, 21 nt, synthetic construct
  modified_base 1: mod_base = gm
  modified_base 2: mod_base = OTHER; note = 2'-O-methyladenosine
  modified_base 3: mod_base = cm
  modified_base 4: mod_base = cm
  modified_base 5: mod_base = cm
  modified_base 6: mod_base = um
  modified_base 7: mod_base = OTHER; note = 2'-O-methyladenosine
  modified_base 8: mod_base = gm
  modified_base 9: mod_base = OTHER; note = 2'-fluoroadenosine
  modified_base 10: mod_base = OTHER; note = 2'-fluoroadenosine
  modified_base 11: mod_base = OTHER; note = 2'-fluorocytidine
  modified_base 12: mod_base = um
  modified_base 13: mod_base = gm
  modified_base 14: mod_base = um
  modified_base 15: mod_base = cm
  modified_base 16: mod_base = um
  modified_base 17: mod_base = um
  modified_base 18: mod_base = cm
  modified_base 19: mod_base = OTHER; note = 2'-O-methylinosine
  modified_base 20: mod_base = OTHER; note = 2'-O-methyladenosine
  modified_base 21: mod_base = OTHER; note = 2'-O-methyladenosine
  source 1..21: mol_type = other RNA
gaccctagaactgtcttcnaa

SEQ ID NO: 880 - RNA, 21 nt, synthetic construct
  modified_base 1: mod_base = OTHER; note = 2'-O-methyladenosine
  modified_base 2: mod_base = cm
  modified_base 3: mod_base = cm
  modified_base 4: mod_base = cm
  modified_base 5: mod_base = um
  modified_base 6: mod_base = OTHER; note = 2'-O-methyladenosine
  modified_base 7: mod_base = gm
  modified_base 8: mod_base = OTHER; note = 2'-O-methyladenosine
  modified_base 9: mod_base = OTHER; note = 2'-fluoroadenosine
  modified_base 10: mod_base = OTHER; note = 2'-fluorocytidine
  modified_base 11: mod_base = OTHER; note = 2'-fluorouridine
  modified_base 12: mod_base = gm
  modified_base 13: mod_base = um
  modified_base 14: mod_base = cm
  modified_base 15: mod_base = um
  modified_base 16: mod_base = um
  modified_base 17: mod_base = cm
  modified_base 18: mod_base = OTHER; note = 2'-O-methylinosine
  modified_base 19: mod_base = OTHER; note = 2'-O-methyladenosine
  modified_base 20: mod_base = cm
  modified_base 21: mod_base = um
  source 1..21: mol_type = other RNA
accctagaactgtcttcnact

SEQ ID NO: 881 - RNA, 21 nt, synthetic construct
  modified_base 1: mod_base = cm
  modified_base 2: mod_base = cm
  modified_base 3: mod_base = cm
  modified_base 4: mod_base = um
  modified_base 5: mod_base = OTHER; note = 2'-O-methyladenosine
  modified_base 6: mod_base = gm
  modified_base 7: mod_base = OTHER; note = 2'-O-methyladenosine
  modified_base 8: mod_base = OTHER; note = 2'-O-methyladenosine
  modified_base 9: mod_base = OTHER; note = 2'-fluorocytidine
  modified_base 10: mod_base = OTHER; note = 2'-fluorouridine
  modified_base 11: mod_base = OTHER; note = 2'-fluoroguanosine
  modified_base 12: mod_base = um
  modified_base 13: mod_base = cm
  modified_base 14: mod_base = um
  modified_base 15: mod_base = um
  modified_base 16: mod_base = cm
  modified_base 17: mod_base = OTHER; note = 2'-O-methylinosine
  modified_base 18: mod_base = OTHER; note = 2'-O-methyladenosine
  modified_base 19: mod_base = cm
  modified_base 20: mod_base = um
  modified_base 21: mod_base = OTHER; note = 2'-O-methyladenosine
  source 1..21: mol_type = other RNA
ccctagaactgtcttcnacta

SEQ ID NO: 882 - RNA, 21 nt, synthetic construct
  modified_base 1: mod_base = um
  modified_base 2: mod_base = gm
  modified_base 3: mod_base = cm
  modified_base 4: mod_base = um
  modified_base 5: mod_base = um
  modified_base 6: mod_base = OTHER; note = 2'-O-methyladenosine
  modified_base 7: mod_base = cm
  modified_base 8: mod_base = um
  modified_base 9: mod_base = OTHER; note = 2'-fluorocytidine
  modified_base 10: mod_base = OTHER; note = 2'-fluoroguanosine
  modified_base 11: mod_base = OTHER; note = 2'-fluoroguanosine
  modified_base 12: mod_base = gm
  modified_base 13: mod_base = OTHER; note = 2'-O-methyladenosine
  modified_base 14: mod_base = OTHER; note = 2'-O-methyladenosine
  modified_base 15: mod_base = OTHER; note = 2'-O-methyladenosine
  modified_base 16: mod_base = um
  modified_base 17: mod_base = um
  modified_base 18: mod_base = um
  modified_base 19: mod_base = gm
  modified_base 20: mod_base = cm
  modified_base 21: mod_base = um
  source 1..21: mol_type = other RNA
tgcttactcgggaaatttgct

SEQ ID NO: 883 - RNA, 21 nt, synthetic construct
  modified_base 1: mod_base = cm
  modified_base 2: mod_base = gm
  modified_base 3: mod_base = gm
  modified_base 4: mod_base = gm
  modified_base 5: mod_base = OTHER; note = 2'-O-methyladenosine
  modified_base 6: mod_base = OTHER; note = 2'-O-methyladenosine
  modified_base 7: mod_base = OTHER; note = 2'-O-methyladenosine
  modified_base 8: mod_base = um
  modified_base 9: mod_base = OTHER; note = 2'-fluorouridine
  modified_base 10: mod_base = OTHER; note = 2'-fluorouridine
  modified_base 11: mod_base = OTHER; note = 2'-fluoroguanosine
  modified_base 12: mod_base = cm
  modified_base 13: mod_base = um
  modified_base 14: mod_base = um
  modified_base 15: mod_base = um
  modified_base 16: mod_base = um
  modified_base 17: mod_base = OTHER; note = 2'-O-methylinosine
  modified_base 18: mod_base = cm
  modified_base 19: mod_base = cm
  modified_base 20: mod_base = OTHER; note = 2'-O-methyladenosine
  modified_base 21: mod_base = OTHER; note = 2'-O-methyladenosine
  source 1..21: mol_type = other RNA
cgggaaatttgcttttnccaa

SEQ ID NO: 884 - RNA, 21 nt, synthetic construct
  modified_base 1: mod_base = OTHER; note = 2'-O-methyladenosine
  modified_base 2: mod_base = cm
  modified_base 3: mod_base = cm
  modified_base 4: mod_base = cm
  modified_base 5: mod_base = cm
  modified_base 6: mod_base = OTHER; note = 2'-O-methyladenosine
  modified_base 7: mod_base = OTHER; note = 2'-O-methyladenosine
  modified_base 8: mod_base = um
  modified_base 9: mod_base = OTHER; note = 2'-fluorocytidine
  modified_base 10: mod_base = OTHER; note = 2'-fluorocytidine
  modified_base 11: mod_base = OTHER; note = 2'-fluoroadenosine
  modified_base 12: mod_base = cm
  modified_base 13: mod_base = gm
  modified_base 14: mod_base = um
  modified_base 15: mod_base = um
  modified_base 16: mod_base = um
  modified_base 17: mod_base = um
  modified_base 18: mod_base = gm
  modified_base 19: mod_base = gm
  modified_base 20: mod_base = OTHER; note = 2'-O-methyladenosine
  modified_base 21: mod_base = um
  source 1..21: mol_type = other RNA
accccaatccacgttttggat

SEQ ID NO: 885 - RNA, 21 nt, synthetic construct
  modified_base 1: mod_base = cm
  modified_base 2: mod_base = cm
  modified_base 3: mod_base = cm
  modified_base 4: mod_base = OTHER; note = 2'-O-methyladenosine
  modified_base 5: mod_base = OTHER; note = 2'-O-methyladenosine
  modified_base 6: mod_base = um
  modified_base 7: mod_base = cm
  modified_base 8: mod_base = cm
  modified_base 9: mod_base = OTHER; note = 2'-fluoroadenosine
  modified_base 10: mod_base = OTHER; note = 2'-fluorocytidine
  modified_base 11: mod_base = OTHER; note = 2'-fluoroguanosine
  modified_base 12: mod_base = um
  modified_base 13: mod_base = um
  modified_base 14: mod_base = um
  modified_base 15: mod_base = um
  modified_base 16: mod_base = gm
  modified_base 17: mod_base = OTHER; note = 2'-O-methylinosine
  modified_base 18: mod_base = OTHER; note = 2'-O-methyladenosine
  modified_base 19: mod_base = um
  modified_base 20: mod_base = gm
  modified_base 21: mod_base = OTHER; note = 2'-O-methyladenosine
  source 1..21: mol_type = other RNA
cccaatccacgttttgnatga

SEQ ID NO: 886 - RNA, 21 nt, synthetic construct
  modified_base 1: mod_base = gm
  modified_base 2: mod_base = OTHER; note = 2'-O-methyladenosine
  modified_base 3: mod_base = gm
  modified_base 4: mod_base = gm
  modified_base 5: mod_base = gm
  modified_base 6: mod_base = OTHER; note = 2'-O-methyladenosine
  modified_base 7: mod_base = cm
  modified_base 8: mod_base = gm
  modified_base 9: mod_base = OTHER; note = 2'-fluorouridine
  modified_base 10: mod_base = OTHER; note = 2'-fluoroguanosine
  modified_base 11: mod_base = OTHER; note = 2'-fluorouridine
  modified_base 12: mod_base = um
  modified_base 13: mod_base = gm
  modified_base 14: mod_base = gm
  modified_base 15: mod_base = um
  modified_base 16: mod_base = OTHER; note = 2'-O-methylinosine
  modified_base 17: mod_base = OTHER; note = 2'-O-methyladenosine
  modified_base 18: mod_base = OTHER; note = 2'-O-methyladenosine
  modified_base 19: mod_base = um
  modified_base 20: mod_base = gm
  modified_base 21: mod_base = OTHER; note = 2'-O-methyladenosine
  source 1..21: mol_type = other RNA
gagggacgtgttggtnaatga

SEQ ID NO: 887 - RNA, 21 nt, synthetic construct
  modified_base 1: mod_base = gm
  modified_base 2: mod_base = gm
  modified_base 3: mod_base = OTHER; note = 2'-O-methyladenosine
  modified_base 4: mod_base = um
  modified_base 5: mod_base = gm
  modified_base 6: mod_base = OTHER; note = 2'-O-methyladenosine
  modified_base 7: mod_base = gm
  modified_base 8: mod_base = OTHER; note = 2'-O-methyladenosine
  modified_base 9: mod_base = OTHER; note = 2'-fluoroadenosine
  modified_base 10: mod_base = OTHER; note = 2'-fluorocytidine
  modified_base 11: mod_base = OTHER; note = 2'-fluorouridine
  modified_base 12: mod_base = OTHER; note = 2'-O-methyladenosine
  modified_base 13: mod_base = cm
  modified_base 14: mod_base = cm
  modified_base 15: mod_base = um
  modified_base 16: mod_base = OTHER; note = 2'-O-methylinosine
  modified_base 17: mod_base = um
  modified_base 18: mod_base = OTHER; note = 2'-O-methyladenosine
  modified_base 19: mod_base = cm
  modified_base 20: mod_base = cm
  modified_base 21: mod_base = um
  source 1..21: mol_type = other RNA
ggatgagaactacctntacct

SEQ ID NO: 888 - RNA, 21 nt, synthetic construct
  modified_base 1: mod_base = cm
  modified_base 2: mod_base = cm
  modified_base 3: mod_base = um
  modified_base 4: mod_base = gm
  modified_base 5: mod_base = gm
  modified_base 6: mod_base = um
  modified_base 7: mod_base = cm
  modified_base 8: mod_base = OTHER; note = 2'-O-methyladenosine
  modified_base 9: mod_base = OTHER; note = 2'-fluorouridine
  modified_base 10: mod_base = OTHER; note = 2'-fluoroguanosine
  modified_base 11: mod_base = OTHER; note = 2'-fluoroguanosine
  modified_base 12: mod_base = OTHER; note = 2'-O-methyladenosine
  modified_base 13: mod_base = gm
  modified_base 14: mod_base = um
  modified_base 15: mod_base = OTHER; note = 2'-O-methyladenosine
  modified_base 16: mod_base = um
  modified_base 17: mod_base = um
  modified_base 18: mod_base = OTHER; note = 2'-O-methyladenosine
  modified_base 19: mod_base = cm
  modified_base 20: mod_base = gm
  modified_base 21: mod_base = um
  source 1..21: mol_type = other RNA
cctggtcatggagtattacgt

SEQ ID NO: 889 - RNA, 21 nt, synthetic construct
  modified_base 1: mod_base = gm
  modified_base 2: mod_base = gm
  modified_base 3: mod_base = OTHER; note = 2'-O-methyladenosine
  modified_base 4: mod_base = cm
  modified_base 5: mod_base = OTHER; note = 2'-O-methyladenosine
  modified_base 6: mod_base = um
  modified_base 7: mod_base = cm
  modified_base 8: mod_base = OTHER; note = 2'-O-methyladenosine
  modified_base 9: mod_base = OTHER; note = 2'-fluoroadenosine
  modified_base 10: mod_base = OTHER; note = 2'-fluoroadenosine
  modified_base 11: mod_base = OTHER; note = 2'-fluorocytidine
  modified_base 12: mod_base = cm
  modified_base 13: mod_base = cm
  modified_base 14: mod_base = gm
  modified_base 15: mod_base = OTHER; note = 2'-O-methyladenosine
  modified_base 16: mod_base = cm
  modified_base 17: mod_base = OTHER; note = 2'-O-methyladenosine
  modified_base 18: mod_base = OTHER; note = 2'-O-methyladenosine
  modified_base 19: mod_base = cm
  modified_base 20: mod_base = OTHER; note = 2'-O-methyladenosine
  modified_base 21: mod_base = um
  source 1..21: mol_type = other RNA
ggacatcaaacccgacaacat

SEQ ID NO: 890 - RNA, 21 nt, synthetic construct
  modified_base 1: mod_base = um
  modified_base 2: mod_base = gm
  modified_base 3: mod_base = gm
  modified_base 4: mod_base = cm
  modified_base 5: mod_base = OTHER; note = 2'-O-methyladenosine
  modified_base 6: mod_base = OTHER; note = 2'-O-methyladenosine
  modified_base 7: mod_base = gm
  modified_base 8: mod_base = OTHER; note = 2'-O-methyladenosine
  modified_base 9: mod_base = OTHER; note = 2'-fluorouridine
  modified_base 10: mod_base = OTHER; note = 2'-fluorocytidine
  modified_base 11: mod_base = OTHER; note = 2'-fluoroguanosine
  modified_base 12: mod_base = um
  modified_base 13: mod_base = cm
  modified_base 14: mod_base = cm
  modified_base 15: mod_base = OTHER; note = 2'-O-methyladenosine
  modified_base 16: mod_base = cm
  modified_base 17: mod_base = um
  modified_base 18: mod_base = OTHER; note = 2'-O-methyladenosine
  modified_base 19: mod_base = cm
  modified_base 20: mod_base = OTHER; note = 2'-O-methyladenosine
  modified_base 21: mod_base = OTHER; note = 2'-O-methyladenosine
  source 1..21: mol_type = other RNA
tggcaagatcgtccactacaa

SEQ ID NO: 891 - RNA, 21 nt, synthetic construct
  modified_base 1: mod_base = cm
  modified_base 2: mod_base = cm
  modified_base 3: mod_base = cm
  modified_base 4: mod_base = cm
  modified_base 5: mod_base = um
  modified_base 6: mod_base = um
  modified_base 7: mod_base = um
  modified_base 8: mod_base = OTHER; note = 2'-O-methyladenosine
  modified_base 9: mod_base = OTHER; note = 2'-fluorocytidine
  modified_base 10: mod_base = OTHER; note = 2'-fluoroadenosine
  modified_base 11: mod_base = OTHER; note = 2'-fluorocytidine
  modified_base 12: mod_base = cm
  modified_base 13: mod_base = gm
  modified_base 14: mod_base = gm
  modified_base 15: mod_base = OTHER; note = 2'-O-methyladenosine
  modified_base 16: mod_base = um
  modified_base 17: mod_base = um
  modified_base 18: mod_base = um
  modified_base 19: mod_base = cm
  modified_base 20: mod_base = gm
  modified_base 21: mod_base = OTHER; note = 2'-O-methyladenosine
  source 1..21: mol_type = other RNA
cccctttacaccggatttcga

SEQ ID NO: 892 - RNA, 21 nt, synthetic construct
  modified_base 1: mod_base = cm
  modified_base 2: mod_base = gm
  modified_base 3: mod_base = OTHER; note = 2'-O-methyladenosine
  modified_base 4: mod_base = cm
  modified_base 5: mod_base = OTHER; note = 2'-O-methyladenosine
  modified_base 6: mod_base = cm
  modified_base 7: mod_base = OTHER; note = 2'-O-methyladenosine
  modified_base 8: mod_base = um
  modified_base 9: mod_base = OTHER; note = 2'-fluoroguanosine
  modified_base 10: mod_base = OTHER; note = 2'-fluorocytidine
  modified_base 11: mod_base = OTHER; note = 2'-fluoroadenosine
  modified_base 12: mod_base = OTHER; note = 2'-O-methyladenosine
  modified_base 13: mod_base = cm
  modified_base 14: mod_base = um
  modified_base 15: mod_base = um
  modified_base 16: mod_base = cm
  modified_base 17: mod_base = OTHER; note = 2'-O-methylinosine
  modified_base 18: mod_base = OTHER; note = 2'-O-methyladenosine
  modified_base 19: mod_base = cm
  modified_base 20: mod_base = um
  modified_base 21: mod_base = um
  source 1..21: mol_type = other RNA
cgacacatgcaacttcnactt

SEQ ID NO: 893 - RNA, 21 nt, synthetic construct
  modified_base 1: mod_base = gm
  modified_base 2: mod_base = gm
  modified_base 3: mod_base = OTHER; note = 2'-O-methyladenosine
  modified_base 4: mod_base = OTHER; note = 2'-O-methyladenosine
  modified_base 5: mod_base = cm
  modified_base 6: mod_base = cm
  modified_base 7: mod_base = cm
  modified_base 8: mod_base = um
  modified_base 9: mod_base = OTHER; note = 2'-fluoroadenosine
  modified_base 10: mod_base = OTHER; note = 2'-fluoroguanosine
  modified_base 11: mod_base = OTHER; note = 2'-fluoroadenosine
  modified_base 12: mod_base = OTHER; note = 2'-O-methyladenosine
  modified_base 13: mod_base = cm
  modified_base 14: mod_base = um
  modified_base 15: mod_base = gm
  modified_base 16: mod_base = um
  modified_base 17: mod_base = cm
  modified_base 18: mod_base = um
  modified_base 19: mod_base = um
  modified_base 20: mod_base = cm
  modified_base 21: mod_base = OTHER; note = 2'-O-methyladenosine
  source 1..21: mol_type = other RNA
ggaaccctagaactgtcttca

SEQ ID NO: 894 - RNA, 21 nt, synthetic construct
  modified_base 1: mod_base = gm
  modified_base 2: mod_base = gm
  modified_base 3: mod_base = OTHER; note = 2'-O-methyladenosine
  modified_base 4: mod_base = OTHER; note = 2'-O-methyladenosine
  modified_base 5: mod_base = cm
  modified_base 6: mod_base = cm
  modified_base 7: mod_base = cm
  modified_base 8: mod_base = um
  modified_base 9: mod_base = OTHER; note = 2'-fluoroadenosine
  modified_base 10: mod_base = OTHER; note = 2'-fluoroguanosine
  modified_base 11: mod_base = OTHER; note = 2'-fluoroadenosine
  modified_base 12: mod_base = OTHER; note = 2'-O-methyladenosine
  modified_base 13: mod_base = cm
  modified_base 14: mod_base = um
  modified_base 15: mod_base = gm
  modified_base 16: mod_base = um
  modified_base 17: mod_base = um
  modified_base 18: mod_base = um
  modified_base 19: mod_base = um
  modified_base 20: mod_base = cm
  modified_base 21: mod_base = OTHER; note = 2'-O-methyladenosine
  source 1..21: mol_type = other RNA
ggaaccctagaactgttttca

SEQ ID NO: 895 - RNA, 21 nt, synthetic construct
  modified_base 1: mod_base = cm
  modified_base 2: mod_base = um
  modified_base 3: mod_base = gm
  modified_base 4: mod_base = cm
  modified_base 5: mod_base = um
  modified_base 6: mod_base = um
  modified_base 7: mod_base = OTHER; note = 2'-O-methyladenosine
  modified_base 8: mod_base = cm
  modified_base 9: mod_base = OTHER; note = 2'-fluorouridine
  modified_base 10: mod_base = OTHER; note = 2'-fluorocytidine
  modified_base 11: mod_base = OTHER; note = 2'-fluoroguanosine
  modified_base 12: mod_base = gm
  modified_base 13: mod_base = gm
  modified_base 14: mod_base = OTHER; note = 2'-O-methyladenosine
  modified_base 15: mod_base = OTHER; note = 2'-O-methyladenosine
  modified_base 16: mod_base = OTHER; note = 2'-O-methyladenosine
  modified_base 17: mod_base = um
  modified_base 18: mod_base = um
  modified_base 19: mod_base = um
  modified_base 20: mod_base = gm
  modified_base 21: mod_base = OTHER; note = 2'-O-methyladenosine
  source 1..21: mol_type = other RNA
ctgcttactcgggaaatttga

SEQ ID NO: 896 - RNA, 21 nt, synthetic construct
  modified_base 1: mod_base = gm
  modified_base 2: mod_base = cm
  modified_base 3: mod_base = gm
  modified_base 4: mod_base = gm
  modified_base 5: mod_base = um
  modified_base 6: mod_base = um
  modified_base 7: mod_base = um
  modified_base 8: mod_base = gm
  modified_base 9: mod_base = OTHER; note = 2'-fluoroguanosine
  modified_base 10: mod_base = OTHER; note = 2'-O-methyl-2-aminoadenosine
  modified_base 11: mod_base = OTHER; note = 2'-fluorouridine
  modified_base 12: mod_base = OTHER; note = 2'-O-methyladenosine
  modified_base 13: mod_base = OTHER; note = 2'-fluorouridine
  modified_base 14: mod_base = um
  modified_base 15: mod_base = um
  modified_base 16: mod_base = OTHER; note = 2'-O-methyladenosine
  modified_base 17: mod_base = um
  modified_base 18: mod_base = um
  modified_base 19: mod_base = gm
  modified_base 20: mod_base = OTHER; note = 2'-O-methyladenosine
  modified_base 21: mod_base = OTHER; note = 2'-O-methyladenosine
  source 1..21: mol_type = other RNA
gcggtttggntatttattgaa

SEQ ID NO: 897 - RNA, 21 nt, synthetic construct
  modified_base 1: mod_base = gm
  modified_base 2: mod_base = cm
  modified_base 3: mod_base = OTHER; note = 2'-O-methyladenosine
  modified_base 4: mod_base = um
  modified_base 5: mod_base = um
  modified_base 6: mod_base = cm
  modified_base 7: mod_base = cm
  modified_base 8: mod_base = um
  modified_base 9: mod_base = OTHER; note = 2'-fluorocytidine
  modified_base 10: mod_base = OTHER; note = 2'-fluoroguanosine
  modified_base 11: mod_base = OTHER; note = 2'-fluoroguanosine
  modified_base 12: mod_base = um
  modified_base 13: mod_base = OTHER; note = 2'-O-methyladenosine
  modified_base 14: mod_base = um
  modified_base 15: mod_base = um
  modified_base 16: mod_base = um
  modified_base 17: mod_base = OTHER; note = 2'-O-methyladenosine
  modified_base 18: mod_base = um
  modified_base 19: mod_base = um
  modified_base 20: mod_base = gm
  modified_base 21: mod_base = um
  source 1..21: mol_type = other RNA
gcattcctcggtatttattgt

SEQ ID NO: 898 - RNA, 21 nt, synthetic construct
  modified_base 1: mod_base = gm
  modified_base 2: mod_base = cm
  modified_base 3: mod_base = OTHER; note = 2'-O-methyladenosine
  modified_base 4: mod_base = um
  modified_base 5: mod_base = um
  modified_base 6: mod_base = cm
  modified_base 7: mod_base = cm
  modified_base 8: mod_base = um
  modified_base 9: mod_base = OTHER; note = 2'-fluorocytidine
  modified_base 10: mod_base = OTHER; note = 2'-fluoroguanosine
  modified_base 11: mod_base = OTHER; note = 2'-fluoroguanosine
  modified_base 12: mod_base = um
  modified_base 13: mod_base = OTHER; note = 2'-O-methyladenosine
  modified_base 14: mod_base = um
  modified_base 15: mod_base = um
  modified_base 16: mod_base = um
  modified_base 17: mod_base = OTHER; note = 2'-O-methyl-2-aminoadenosine
  modified_base 18: mod_base = um
  modified_base 19: mod_base = um
  modified_base 20: mod_base = gm
  modified_base 21: mod_base = um
  source 1..21: mol_type = other RNA
gcattcctcggtatttnttgt

SEQ ID NO: 899 - RNA, 21 nt, synthetic construct
  modified_base 1: mod_base = gm
  modified_base 2: mod_base = OTHER; note = 2'-O-methyladenosine
  modified_base 3: mod_base = cm
  modified_base 4: mod_base = cm
  modified_base 5: mod_base = cm
  modified_base 6: mod_base = um
  modified_base 7: mod_base = cm
  modified_base 8: mod_base = gm
  modified_base 9: mod_base = OTHER; note = 2'-fluorocytidine
  modified_base 10: mod_base = OTHER; note = 2'-fluoroguanosine
  modified_base 11: mod_base = OTHER; note = 2'-fluoroadenosine
  modified_base 12: mod_base = OTHER; note = 2'-O-methyladenosine
  modified_base 13: mod_base = um
  modified_base 14: mod_base = OTHER; note = 2'-O-methyladenosine
  modified_base 15: mod_base = OTHER; note = 2'-O-methyladenosine
  modified_base 16: mod_base = OTHER; note = 2'-O-methyladenosine
  modified_base 17: mod_base = OTHER; note = 2'-O-methyladenosine
  modified_base 18: mod_base = gm
  modified_base 19: mod_base = OTHER; note = 2'-O-methylinosine
  modified_base 20: mod_base = cm
  modified_base 21: mod_base = OTHER; note = 2'-O-methyladenosine
  source 1..21: mol_type = other RNA
gaccctcgcgaataaaagnca

SEQ ID NO: 900 - RNA, 21 nt, synthetic construct
  modified_base 1: mod_base = OTHER; note = 2'-O-methyladenosine
  modified_base 2: mod_base = gm
  modified_base 3: mod_base = gm
  modified_base 4: mod_base = gm
  modified_base 5: mod_base = gm
  modified_base 6: mod_base = cm
  modified_base 7: mod_base = gm
  modified_base 8: mod_base = OTHER; note = 2'-O-methyladenosine
  modified_base 9: mod_base = OTHER; note = 2'-fluoroguanosine
  modified_base 10: mod_base = OTHER; note = 2'-fluoroguanosine
  modified_base 11: mod_base = OTHER; note = 2'-fluorouridine
  modified_base 12: mod_base = gm
  modified_base 13: mod_base = um
  modified_base 14: mod_base = cm
  modified_base 15: mod_base = gm
  modified_base 16: mod_base = um
  modified_base 17: mod_base = gm
  modified_base 18: mod_base = cm
  modified_base 19: mod_base = um
  modified_base 20: mod_base = um
  modified_base 21: mod_base = OTHER; note = 2'-O-methyladenosine
  source 1..21: mol_type = other RNA
aggggcgaggtgtcgtgctta

SEQ ID NO: 901 - RNA, 21 nt, synthetic construct
  modified_base 1: mod_base = gm
  modified_base 2: mod_base = gm
  modified_base 3: mod_base = cm
  modified_base 4: mod_base = OTHER; note = 2'-O-methyladenosine
  modified_base 5: mod_base = gm
  modified_base 6: mod_base = OTHER; note = 2'-O-methyladenosine
  modified_base 7: mod_base = cm
  modified_base 8: mod_base = gm
  modified_base 9: mod_base = OTHER; note = 2'-fluorocytidine
  modified_base 10: mod_base = OTHER; note = 2'-fluorocytidine
  modified_base 11: mod_base = OTHER; note = 2'-fluorocytidine
  modified_base 12: mod_base = um
  modified_base 13: mod_base = um
  modified_base 14: mod_base = cm
  modified_base 15: mod_base = um
  modified_base 16: mod_base = OTHER; note = 2'-O-methyladenosine
  modified_base 17: mod_base = cm
  modified_base 18: mod_base = gm
  modified_base 19: mod_base = cm
  modified_base 20: mod_base = gm
  modified_base 21: mod_base = OTHER; note = 2'-O-methyladenosine
  source 1..21: mol_type = other RNA
ggcagacgcccttctacgcga

SEQ ID NO: 902 - RNA, 21 nt, synthetic construct
  modified_base 1: mod_base = gm
  modified_base 2: mod_base = gm
  modified_base 3: mod_base = cm
  modified_base 4: mod_base = OTHER; note = 2'-O-methyladenosine
  modified_base 5: mod_base = gm
  modified_base 6: mod_base = OTHER; note = 2'-O-methyladenosine
  modified_base 7: mod_base = cm
  modified_base 8: mod_base = cm
  modified_base 9: mod_base = OTHER; note = 2'-fluorocytidine
  modified_base 10: mod_base = OTHER; note = 2'-fluorocytidine
  modified_base 11: mod_base = OTHER; note = 2'-fluorocytidine
  modified_base 12: mod_base = um
  modified_base 13: mod_base = um
  modified_base 14: mod_base = cm
  modified_base 15: mod_base = um
  modified_base 16: mod_base = OTHER; note = 2'-O-methyladenosine
  modified_base 17: mod_base = cm
  modified_base 18: mod_base = gm
  modified_base 19: mod_base = cm
  modified_base 20: mod_base = gm
  modified_base 21: mod_base = OTHER; note = 2'-O-methyladenosine
  source 1..21: mol_type = other RNA
ggcagacccccttctacgcga

SEQ ID NO: 903 - RNA, 21 nt, synthetic construct
  modified_base 1: mod_base = cm
  modified_base 2: mod_base = cm
  modified_base 3: mod_base = cm
  modified_base 4: mod_base = cm
  modified_base 5: mod_base = gm
  modified_base 6: mod_base = OTHER; note = 2'-O-methyladenosine
  modified_base 7: mod_base = cm
  modified_base 8: mod_base = OTHER; note = 2'-O-methyladenosine
  modified_base 9: mod_base = OTHER; note = 2'-fluorouridine
  modified_base 10: mod_base = OTHER; note = 2'-fluorouridine
  modified_base 11: mod_base = OTHER; note = 2'-fluorocytidine
  modified_base 12: mod_base = cm
  modified_base 13: mod_base = um
  modified_base 14: mod_base = cm
  modified_base 15: mod_base = gm
  modified_base 16: mod_base = gm
  modified_base 17: mod_base = um
  modified_base 18: mod_base = OTHER; note = 2'-O-methyladenosine
  modified_base 19: mod_base = um
  modified_base 20: mod_base = um
  modified_base 21: mod_base = OTHER; note = 2'-O-methyladenosine
  source 1..21: mol_type = other RNA
ccccgacattcctcggtatta

SEQ ID NO: 904 - RNA, 21 nt, synthetic construct
  modified_base 1: mod_base = um
  modified_base 2: mod_base = um
  modified_base 3: mod_base = cm
  modified_base 4: mod_base = cm
  modified_base 5: mod_base = um
  modified_base 6: mod_base = cm
  modified_base 7: mod_base = gm
  modified_base 8: mod_base = gm
  modified_base 9: mod_base = OTHER; note = 2'-fluorouridine
  modified_base 10: mod_base = OTHER; note = 2'-fluoroadenosine
  modified_base 11: mod_base = OTHER; note = 2'-fluorouridine
  modified_base 12: mod_base = um
  modified_base 13: mod_base = um
  modified_base 14: mod_base = OTHER; note = 2'-O-methyladenosine
  modified_base 15: mod_base = um
  modified_base 16: mod_base = um
  modified_base 17: mod_base = gm
  modified_base 18: mod_base = um
  modified_base 19: mod_base = cm
  modified_base 20: mod_base = um
  modified_base 21: mod_base = OTHER; note = 2'-O-methyladenosine
  source 1..21: mol_type = other RNA
ttcctcggtatttattgtcta

SEQ ID NO: 905 - RNA, 19 nt, synthetic construct
  modified_base 1: mod_base = gm
  modified_base 2: mod_base = cm
  modified_base 3: mod_base = gm
  modified_base 4: mod_base = OTHER; note = 2'-O-methyladenosine
  modified_base 5: mod_base = gm
  modified_base 6: mod_base = gm
  modified_base 7: mod_base = OTHER; note = 2'-fluorouridine
  modified_base 8: mod_base = OTHER; note = 2'-fluoroadenosine
  modified_base 9: mod_base = OTHER; note = 2'-fluoroguanosine
  modified_base 10: mod_base = cm
  modified_base 11: mod_base = gm
  modified_base 12: mod_base = gm
  modified_base 13: mod_base = um
  modified_base 14: mod_base = OTHER; note = 2'-O-methyladenosine
  modified_base 15: mod_base = gm
  modified_base 16: mod_base = um
  modified_base 17: mod_base = gm
  modified_base 18: mod_base = OTHER; note = 2'-O-methyladenosine
  modified_base 19: mod_base = OTHER; note = 2'-O-methyladenosine
  source 1..19: mol_type = other RNA
gcgaggtagcggtagtgaa

SEQ ID NO: 906 - RNA, 21 nt, synthetic construct
  modified_base 1: mod_base = OTHER; note = 2'-O-methyladenosine
  modified_base 2: mod_base = gm
  modified_base 3: mod_base = gm
  modified_base 4: mod_base = gm
  modified_base 5: mod_base = gm
  modified_base 6: mod_base = cm
  modified_base 7: mod_base = gm
  modified_base 8: mod_base = OTHER; note = 2'-O-methyladenosine
  modified_base 9: mod_base = OTHER; note = 2'-fluoroguanosine
  modified_base 10: mod_base = OTHER; note = 2'-fluoroguanosine
  modified_base 11: mod_base = OTHER; note = 2'-fluorouridine
  modified_base 12: mod_base = gm
  modified_base 13: mod_base = um
  modified_base 14: mod_base = cm
  modified_base 15: mod_base = gm
  modified_base 16: mod_base = um
  modified_base 17: mod_base = gm
  modified_base 18: mod_base = cm
  modified_base 19: mod_base = um
  modified_base 20: mod_base = um
  modified_base 21: mod_base = OTHER; note = 2'-O-methyladenosine
  source 1..21: mol_type = other RNA
aggggcgaggtgtcgtgctta

SEQ ID NO: 907 - RNA, 21 nt, synthetic construct
  modified_base 1: mod_base = cm
  modified_base 2: mod_base = cm
  modified_base 3: mod_base = cm
  modified_base 4: mod_base = cm
  modified_base 5: mod_base = gm
  modified_base 6: mod_base = OTHER; note = 2'-O-methyladenosine
  modified_base 7: mod_base = cm
  modified_base 8: mod_base = OTHER; note = 2'-O-methyladenosine
  modified_base 9: mod_base = OTHER; note = 2'-fluorouridine
  modified_base 10: mod_base = OTHER; note = 2'-fluorouridine
  modified_base 11: mod_base = OTHER; note = 2'-fluorocytidine
  modified_base 12: mod_base = cm
  modified_base 13: mod_base = um
  modified_base 14: mod_base = cm
  modified_base 15: mod_base = gm
  modified_base 16: mod_base = gm
  modified_base 17: mod_base = um
  modified_base 18: mod_base = OTHER; note = 2'-O-methyladenosine
  modified_base 19: mod_base = um
  modified_base 20: mod_base = um
  modified_base 21: mod_base = OTHER; note = 2'-O-methyladenosine
  source 1..21: mol_type = other RNA
ccccgacattcctcggtatta

SEQ ID NO: 908 - RNA, 21 nt, synthetic construct
  modified_base 1: mod_base = um
  modified_base 2: mod_base = um
  modified_base 3: mod_base = cm
  modified_base 4: mod_base = cm
  modified_base 5: mod_base = um
  modified_base 6: mod_base = cm
  modified_base 7: mod_base = gm
  modified_base 8: mod_base = gm
  modified_base 9: mod_base = OTHER; note = 2'-fluorouridine
  modified_base 10: mod_base = OTHER; note = 2'-fluoroadenosine
  modified_base 11: mod_base = OTHER; note = 2'-fluorouridine
  modified_base 12: mod_base = um
  modified_base 13: mod_base = um
  modified_base 14: mod_base = OTHER; note = 2'-O-methyladenosine
  modified_base 15: mod_base = um
  modified_base 16: mod_base = um
  modified_base 17: mod_base = gm
  modified_base 18: mod_base = um
  modified_base 19: mod_base = cm
  modified_base 20: mod_base = um
  modified_base 21: mod_base = OTHER; note = 2'-O-methyladenosine
  source 1..21: mol_type = other RNA
ttcctcggtatttattgtcta

SEQ ID NO: 909 - RNA, 21 nt, synthetic construct
  modified_base 1: mod_base = OTHER; note = 2'-O-methyladenosine
  modified_base 2: mod_base = cm
  modified_base 3: mod_base = um
  modified_base 4: mod_base = cm
  modified_base 5: mod_base = gm
  modified_base 6: mod_base = gm
  modified_base 7: mod_base = gm
  modified_base 8: mod_base = OTHER; note = 2'-O-methyladenosine
  modified_base 9: mod_base = OTHER; note = 2'-fluoroadenosine
  modified_base 10: mod_base = OTHER; note = 2'-fluoroadenosine
  modified_base 11: mod_base = OTHER; note = 2'-fluorouridine
  modified_base 12: mod_base = um
  modified_base 13: mod_base = um
  modified_base 14: mod_base = gm
  modified_base 15: mod_base = cm
  modified_base 16: mod_base = um
  modified_base 17: mod_base = um
  modified_base 18: mod_base = um
  modified_base 19: mod_base = um
  modified_base 20: mod_base = gm
  modified_base 21: mod_base = OTHER; note = 2'-O-methyladenosine
  source 1..21: mol_type = other RNA
actcgggaaatttgcttttga

SEQ ID NO: 910 - RNA, 21 nt, synthetic construct
  modified_base 1: mod_base = gm
  modified_base 2: mod_base = gm
  modified_base 3: mod_base = OTHER; note = 2'-O-methyladenosine
  modified_base 4: mod_base = OTHER; note = 2'-O-methyladenosine
  modified_base 5: mod_base = OTHER; note = 2'-O-methyladenosine
  modified_base 6: mod_base = um
  modified_base 7: mod_base = um
  modified_base 8: mod_base = um
  modified_base 9: mod_base = OTHER; note = 2'-fluoroguanosine
  modified_base 10: mod_base = OTHER; note = 2'-fluorocytidine
  modified_base 11: mod_base = OTHER; note = 2'-fluorouridine
  modified_base 12: mod_base = um
  modified_base 13: mod_base = um
  modified_base 14: mod_base = um
  modified_base 15: mod_base = gm
  modified_base 16: mod_base = um
  modified_base 17: mod_base = cm
  modified_base 18: mod_base = OTHER; note = 2'-O-methyladenosine
  modified_base 19: mod_base = OTHER; note = 2'-O-methyladenosine
  modified_base 20: mod_base = OTHER; note = 2'-O-methyladenosine
  modified_base 21: mod_base = OTHER; note = 2'-O-methyladenosine
  source 1..21: mol_type = other RNA
ggaaatttgcttttgtcaaaa

SEQ ID NO: 911 - RNA, 21 nt, synthetic construct
  modified_base 1: mod_base = um
  modified_base 2: mod_base = cm
  modified_base 3: mod_base = gm
  modified_base 4: mod_base = gm
  modified_base 5: mod_base = cm
  modified_base 6: mod_base = gm
  modified_base 7: mod_base = gm
  modified_base 8: mod_base = um
  modified_base 9: mod_base = OTHER; note = 2'-fluorouridine
  modified_base 10: mod_base = OTHER; note = 2'-fluorouridine
  modified_base 11: mod_base = OTHER; note = 2'-fluoroguanosine
  modified_base 12: mod_base = gm
  modified_base 13: mod_base = OTHER; note = 2'-O-methyladenosine
  modified_base 14: mod_base = um
  modified_base 15: mod_base = OTHER; note = 2'-O-methyladenosine
  modified_base 16: mod_base = um
  modified_base 17: mod_base = um
  modified_base 18: mod_base = um
  modified_base 19: mod_base = OTHER; note = 2'-O-methyl-2-aminoadenosine
  modified_base 20: mod_base = um
  modified_base 21: mod_base = um
  source 1..21: mol_type = other RNA
tcggcggtttggatatttntt

SEQ ID NO: 912 - RNA, 21 nt, synthetic construct
  modified_base 1: mod_base = cm
  modified_base 2: mod_base = gm
  modified_base 3: mod_base = gm
  modified_base 4: mod_base = cm
  modified_base 5: mod_base = gm
  modified_base 6: mod_base = gm
  modified_base 7: mod_base = um
  modified_base 8: mod_base = um
  modified_base 9: mod_base = OTHER; note = 2'-fluorouridine
  modified_base 10: mod_base = OTHER; note = 2'-fluoroguanosine
  modified_base 11: mod_base = OTHER; note = 2'-fluoroguanosine
  modified_base 12: mod_base = OTHER; note = 2'-O-methyladenosine
  modified_base 13: mod_base = um
  modified_base 14: mod_base = OTHER; note = 2'-O-methyladenosine
  modified_base 15: mod_base = um
  modified_base 16: mod_base = um
  modified_base 17: mod_base = um
  modified_base 18: mod_base = OTHER; note = 2'-O-methyl-2-aminoadenosine
  modified_base 19: mod_base = um
  modified_base 20: mod_base = um
  modified_base 21: mod_base = OTHER; note = 2'-O-methyladenosine
  source 1..21: mol_type = other RNA
cggcggtttggatatttntta

SEQ ID NO: 913 - RNA, 21 nt, synthetic construct
  modified_base 1: mod_base = OTHER; note = 2'-O-methyladenosine
  modified_base 2: mod_base = OTHER; note = 2'-O-methyladenosine
  modified_base 3: mod_base = cm
  modified_base 4: mod_base = cm
  modified_base 5: mod_base = cm
  modified_base 6: mod_base = cm
  modified_base 7: mod_base = OTHER; note = 2'-O-methyladenosine
  modified_base 8: mod_base = OTHER; note = 2'-O-methyladenosine
  modified_base 9: mod_base = OTHER; note = 2'-fluorouridine
  modified_base 10: mod_base = OTHER; note = 2'-fluorocytidine
  modified_base 11: mod_base = OTHER; note = 2'-fluorocytidine
  modified_base 12: mod_base = OTHER; note = 2'-O-methyladenosine
  modified_base 13: mod_base = cm
  modified_base 14: mod_base = gm
  modified_base 15: mod_base = um
  modified_base 16: mod_base = um
  modified_base 17: mod_base = um
  modified_base 18: mod_base = um
  modified_base 19: mod_base = gm
  modified_base 20: mod_base = gm
  modified_base 21: mod_base = OTHER; note = 2'-O-methyladenosine
  source 1..21: mol_type = other RNA
aaccccaatccacgttttgga

SEQ ID NO: 914 - RNA, 21 nt, synthetic construct
  modified_base 1: mod_base = gm
  modified_base 2: mod_base = OTHER; note = 2'-O-methyladenosine
  modified_base 3: mod_base = um
  modified_base 4: mod_base = cm
  modified_base 5: mod_base = cm
  modified_base 6: mod_base = OTHER; note = 2'-O-methyladenosine
  modified_base 7: mod_base = cm
  modified_base 8: mod_base = gm
  modified_base 9: mod_base = OTHER; note = 2'-fluorouridine
  modified_base 10: mod_base = OTHER; note = 2'-fluorouridine
  modified_base 11: mod_base = OTHER; note = 2'-fluorouridine
  modified_base 12: mod_base = um
  modified_base 13: mod_base = gm
  modified_base 14: mod_base = gm
  modified_base 15: mod_base = OTHER; note = 2'-O-methyladenosine
  modified_base 16: mod_base = um
  modified_base 17: mod_base = OTHER; note = 2'-O-methylinosine
  modified_base 18: mod_base = cm
  modified_base 19: mod_base = OTHER; note = 2'-O-methyladenosine
  modified_base 20: mod_base = cm
  modified_base 21: mod_base = um
  source 1..21: mol_type = other RNA
gatccacgttttggatncact

SEQ ID NO: 915 - RNA, 21 nt, synthetic construct
  modified_base 1: mod_base = OTHER; note = 2'-O-methyladenosine
  modified_base 2: mod_base = cm
  modified_base 3: mod_base = gm
  modified_base 4: mod_base = um
  modified_base 5: mod_base = um
  modified_base 6: mod_base = um
  modified_base 7: mod_base = um
  modified_base 8: mod_base = gm
  modified_base 9: mod_base = OTHER; note = 2'-fluoroguanosine
  modified_base 10: mod_base = OTHER; note = 2'-fluoroadenosine
  modified_base 11: mod_base = OTHER; note = 2'-fluorouridine
  modified_base 12: mod_base = gm
  modified_base 13: mod_base = cm
  modified_base 14: mod_base = OTHER; note = 2'-O-methyladenosine
  modified_base 15: mod_base = cm
  modified_base 16: mod_base = um
  modified_base 17: mod_base = OTHER; note = 2'-O-methylinosine
  modified_base 18: mod_base = OTHER; note = 2'-O-methyladenosine
  modified_base 19: mod_base = gm
  modified_base 20: mod_base = OTHER; note = 2'-O-methyladenosine
  modified_base 21: mod_base = OTHER; note = 2'-O-methyladenosine
  source 1..21: mol_type = other RNA
acgttttggatgcactnagaa

SEQ ID NO: 916 - RNA, 21 nt, synthetic construct
  modified_base 1: mod_base = cm
  modified_base 2: mod_base = gm
  modified_base 3: mod_base = um
  modified_base 4: mod_base = um
  modified_base 5: mod_base = um
  modified_base 6: mod_base = um
  modified_base 7: mod_base = gm
  modified_base 8: mod_base = gm
  modified_base 9: mod_base = OTHER; note = 2'-fluoroadenosine
  modified_base 10: mod_base = OTHER; note = 2'-fluorouridine
  modified_base 11: mod_base = OTHER; note = 2'-fluoroguanosine
  modified_base 12: mod_base = cm
  modified_base 13: mod_base = OTHER; note = 2'-O-methyladenosine
  modified_base 14: mod_base = cm
  modified_base 15: mod_base = um
  modified_base 16: mod_base = OTHER; note = 2'-O-methylinosine
  modified_base 17: mod_base = OTHER; note = 2'-O-methyladenosine
  modified_base 18: mod_base = gm
  modified_base 19: mod_base = OTHER; note = 2'-O-methyladenosine
  modified_base 20: mod_base = cm
  modified_base 21: mod_base = OTHER; note = 2'-O-methyladenosine
  source 1..21: mol_type = other RNA
cgttttggatgcactnagaca

SEQ ID NO: 917 - RNA, 21 nt, synthetic construct
  modified_base 1: mod_base = OTHER; note = 2'-O-methyladenosine
  modified_base 2: mod_base = um
  modified_base 3: mod_base = um
  modified_base 4: mod_base = cm
  modified_base 5: mod_base = cm
  modified_base 6: mod_base = um
  modified_base 7: mod_base = cm
  modified_base 8: mod_base = gm
  modified_base 9: mod_base = OTHER; note = 2'-fluoroguanosine
  modified_base 10: mod_base = OTHER; note = 2'-fluorouridine
  modified_base 11: mod_base = OTHER; note = 2'-fluoroadenosine
  modified_base 12: mod_base = um
  modified_base 13: mod_base = um
  modified_base 14: mod_base = um
  modified_base 15: mod_base = OTHER; note = 2'-O-methyladenosine
  modified_base 16: mod_base = um
  modified_base 17: mod_base = um
  modified_base 18: mod_base = gm
  modified_base 19: mod_base = um
  modified_base 20: mod_base = cm
  modified_base 21: mod_base = um
  source 1..21: mol_type = other RNA
attcctcggtatttattgtct

SEQ ID NO: 918 - RNA, 21 nt, synthetic construct
  modified_base 1: mod_base = cm
  modified_base 2: mod_base = cm
  modified_base 3: mod_base = um
  modified_base 4: mod_base = cm
  modified_base 5: mod_base = gm
  modified_base 6: mod_base = gm
  modified_base 7: mod_base = um
  modified_base 8: mod_base = OTHER; note = 2'-O-methyladenosine
  modified_base 9: mod_base = OTHER; note = 2'-fluorouridine
  modified_base 10: mod_base = OTHER; note = 2'-fluorouridine
  modified_base 11: mod_base = OTHER; note = 2'-fluorouridine
  modified_base 12: mod_base = OTHER; note = 2'-O-methyladenosine
  modified_base 13: mod_base = um
  modified_base 14: mod_base = um
  modified_base 15: mod_base = gm
  modified_base 16: mod_base = um
  modified_base 17: mod_base = um
  modified_base 18: mod_base = um
  modified_base 19: mod_base = gm
  modified_base 20: mod_base = um
  modified_base 21: mod_base = OTHER; note = 2'-O-methyladenosine
  source 1..21: mol_type = other RNA
cctcggtatttattgtttgta

SEQ ID NO: 919 - RNA, 21 nt, synthetic construct
  modified_base 1: mod_base = gm
  modified_base 2: mod_base = cm
  modified_base 3: mod_base = OTHER; note = 2'-O-methyladenosine
  modified_base 4: mod_base = um
  modified_base 5: mod_base = um
  modified_base 6: mod_base = cm
  modified_base 7: mod_base = cm
  modified_base 8: mod_base = um
  modified_base 9: mod_base = OTHER; note = 2'-fluorocytidine
  modified_base 10: mod_base = OTHER; note = 2'-fluoroguanosine
  modified_base 11: mod_base = OTHER; note = 2'-fluoroguanosine
  modified_base 12: mod_base = um
  modified_base 13: mod_base = OTHER; note = 2'-O-methyladenosine
  modified_base 14: mod_base = um
  modified_base 15: mod_base = um
  modified_base 16: mod_base = um
  modified_base 17: mod_base = OTHER; note = 2'-O-methyladenosine
  modified_base 18: mod_base = um
  modified_base 19: mod_base = um
  modified_base 20: mod_base = gm
  modified_base 21: mod_base = um
  source 1..21: mol_type = other RNA
gcattcctcggtatttattgt

SEQ ID NO: 920 - RNA, 21 nt, synthetic construct
  modified_base 1: mod_base = cm
  modified_base 2: mod_base = cm
  modified_base 3: mod_base = um
  modified_base 4: mod_base = gm
  modified_base 5: mod_base = gm
  modified_base 6: mod_base = um
  modified_base 7: mod_base = cm
  modified_base 8: mod_base = OTHER; note = 2'-O-methyladenosine
  modified_base 9: mod_base = OTHER; note = 2'-fluorouridine
  modified_base 10: mod_base = OTHER; note = 2'-fluoroguanosine
  modified_base 11: mod_base = OTHER; note = 2'-fluoroguanosine
  modified_base 12: mod_base = OTHER; note = 2'-O-methyladenosine
  modified_base 13: mod_base = gm
  modified_base 14: mod_base = um
  modified_base 15: mod_base = OTHER; note = 2'-O-methyladenosine
  modified_base 16: mod_base = um
  modified_base 17: mod_base = um
  modified_base 18: mod_base = OTHER; note = 2'-O-methyladenosine
  modified_base 19: mod_base = cm
  modified_base 20: mod_base = gm
  modified_base 21: mod_base = um
  source 1..21: mol_type = other RNA
cctggtcatggagtattacgt

SEQ ID NO: 921 - RNA, 21 nt, synthetic construct
  modified_base 1: mod_base = gm
  modified_base 2: mod_base = um
  modified_base 3: mod_base = cm
  modified_base 4: mod_base = cm
  modified_base 5: mod_base = um
  modified_base 6: mod_base = cm
  modified_base 7: mod_base = gm
  modified_base 8: mod_base = gm
  modified_base 9: mod_base = OTHER; note = 2'-fluorouridine
  modified_base 10: mod_base = OTHER; note = 2'-fluoroadenosine
  modified_base 11: mod_base = OTHER; note = 2'-fluorouridine
  modified_base 12: mod_base = um
  modified_base 13: mod_base = um
  modified_base 14: mod_base = OTHER; note = 2'-O-methyladenosine
  modified_base 15: mod_base = um
  modified_base 16: mod_base = um
  modified_base 17: mod_base = gm
  modified_base 18: mod_base = um
  modified_base 19: mod_base = cm
  modified_base 20: mod_base = um
  modified_base 21: mod_base = OTHER; note = 2'-O-methyladenosine
  source 1..21: mol_type = other RNA
gtcctcggtatttattgtcta

SEQ ID NO: 922 - RNA, 21 nt, synthetic construct
  modified_base 1: mod_base = um
  modified_base 2: mod_base = um
  modified_base 3: mod_base = cm
  modified_base 4: mod_base = cm
  modified_base 5: mod_base = um
  modified_base 6: mod_base = cm
  modified_base 7: mod_base = gm
  modified_base 8: mod_base = gm
  modified_base 9: mod_base = OTHER; note = 2'-fluorouridine
  modified_base 10: mod_base = OTHER; note = 2'-O-methyladenosine
  modified_base 11: mod_base = OTHER; note = 2'-fluorouridine
  modified_base 12: mod_base = um
  modified_base 13: mod_base = OTHER; note = 2'-fluorouridine
  modified_base 14: mod_base = OTHER; note = 2'-O-methyladenosine
  modified_base 15: mod_base = um
  modified_base 16: mod_base = um
  modified_base 17: mod_base = gm
  modified_base 18: mod_base = um
  modified_base 19: mod_base = cm
  modified_base 20: mod_base = um
  modified_base 21: mod_base = OTHER; note = 2'-O-methyladenosine
  source 1..21: mol_type = other RNA
ttcctcggtatttattgtcta

SEQ ID NO: 923 - RNA, 21 nt, synthetic construct
  modified_base 1: mod_base = cm
  modified_base 2: mod_base = cm
  modified_base 3: mod_base = um
  modified_base 4: mod_base = gm
  modified_base 5: mod_base = gm
  modified_base 6: mod_base = um
  modified_base 7: mod_base = cm
  modified_base 8: mod_base = OTHER; note = 2'-O-methyladenosine
  modified_base 9: mod_base = OTHER; note = 2'-fluorouridine
  modified_base 10: mod_base = gm
  modified_base 11: mod_base = OTHER; note = 2'-fluoroguanosine
  modified_base 12: mod_base = OTHER; note = 2'-O-methyladenosine
  modified_base 13: mod_base = OTHER; note = 2'-fluoroguanosine
  modified_base 14: mod_base = um
  modified_base 15: mod_base = OTHER; note = 2'-O-methyladenosine
  modified_base 16: mod_base = um
  modified_base 17: mod_base = um
  modified_base 18: mod_base = OTHER; note = 2'-O-methyladenosine
  modified_base 19: mod_base = cm
  modified_base 20: mod_base = gm
  modified_base 21: mod_base = um
  source 1..21: mol_type = other RNA
cctggtcatggagtattacgt

SEQ ID NO: 924 - RNA, 21 nt, synthetic construct
  modified_base 1: mod_base = cm
  modified_base 2: mod_base = cm
  modified_base 3: mod_base = um
  modified_base 4: mod_base = gm
  modified_base 5: mod_base = gm
  modified_base 6: mod_base = um
  modified_base 7: mod_base = cm
  modified_base 8: mod_base = OTHER; note = 2'-O-methyladenosine
  modified_base 9: mod_base = OTHER; note = 2'-fluorouridine
  modified_base 10: mod_base = gm
  modified_base 11: mod_base = OTHER; note = 2'-fluoroguanosine
  modified_base 12: mod_base = OTHER; note = 2'-O-methyladenosine
  modified_base 13: mod_base = gm
  modified_base 14: mod_base = um
  modified_base 15: mod_base = OTHER; note = 2'-O-methyladenosine
  modified_base 16: mod_base = um
  modified_base 17: mod_base = um
  modified_base 18: mod_base = OTHER; note = 2'-O-methyladenosine
  modified_base 19: mod_base = cm
  modified_base 20: mod_base = gm
  modified_base 21: mod_base = um
  source 1..21: mol_type = other RNA
cctggtcatggagtattacgt

SEQ ID NO: 925 - RNA, 21 nt, synthetic construct
  modified_base 1: mod_base = cm
  modified_base 2: mod_base = cm
  modified_base 3: mod_base = cm
  modified_base 4: mod_base = cm
  modified_base 5: mod_base = gm
  modified_base 6: mod_base = OTHER; note = 2'-O-methyladenosine
  modified_base 7: mod_base = cm
  modified_base 8: mod_base = OTHER; note = 2'-O-methyladenosine
  modified_base 9: mod_base = OTHER; note = 2'-fluorouridine
  modified_base 10: mod_base = OTHER; note = 2'-fluorouridine
  modified_base 11: mod_base = OTHER; note = 2'-fluorocytidine
  modified_base 12: mod_base = cm
  modified_base 13: mod_base = um
  modified_base 14: mod_base = cm
  modified_base 15: mod_base = gm
  modified_base 16: mod_base = gm
  modified_base 17: mod_base = um
  modified_base 18: mod_base = OTHER; note = 2'-O-methyladenosine
  modified_base 19: mod_base = um
  modified_base 20: mod_base = um
  modified_base 21: mod_base = OTHER; note = 2'-O-methyladenosine
  source 1..21: mol_type = other RNA
ccccgacattcctcggtatta

SEQ ID NO: 926 - RNA, 21 nt, synthetic construct
  modified_base 1: mod_base = um
  modified_base 2: mod_base = um
  modified_base 3: mod_base = cm
  modified_base 4: mod_base = cm
  modified_base 5: mod_base = um
  modified_base 6: mod_base = cm
  modified_base 7: mod_base = gm
  modified_base 8: mod_base = gm
  modified_base 9: mod_base = OTHER; note = 2'-fluorouridine
  modified_base 10: mod_base = OTHER; note = 2'-fluoroadenosine
  modified_base 11: mod_base = OTHER; note = 2'-fluorouridine
  modified_base 12: mod_base = um
  modified_base 13: mod_base = um
  modified_base 14: mod_base = OTHER; note = 2'-O-methyladenosine
  modified_base 15: mod_base = um
  modified_base 16: mod_base = um
  modified_base 17: mod_base = gm
  modified_base 18: mod_base = um
  modified_base 19: mod_base = cm
  modified_base 20: mod_base = um
  modified_base 21: mod_base = OTHER; note = 2'-O-methyladenosine
  source 1..21: mol_type = other RNA
ttcctcggtatttattgtcta

SEQ ID NO: 927 - RNA, 21 nt, synthetic construct
  modified_base 1: mod_base = um
  modified_base 2: mod_base = gm
  modified_base 3: mod_base = gm
  modified_base 4: mod_base = cm
  modified_base 5: mod_base = OTHER; note = 2'-O-methyladenosine
  modified_base 6: mod_base = OTHER; note = 2'-O-methyladenosine
  modified_base 7: mod_base = gm
  modified_base 8: mod_base = OTHER; note = 2'-O-methyladenosine
  modified_base 9: mod_base = OTHER; note = 2'-fluorouridine
  modified_base 10: mod_base = cm
  modified_base 11: mod_base = OTHER; note = 2'-fluoroguanosine
  modified_base 12: mod_base = um
  modified_base 13: mod_base = cm
  modified_base 14: mod_base = cm
  modified_base 15: mod_base = OTHER; note = 2'-O-methyladenosine
  modified_base 16: mod_base = cm
  modified_base 17: mod_base = um
  modified_base 18: mod_base = OTHER; note = 2'-O-methyladenosine
  modified_base 19: mod_base = cm
  modified_base 20: mod_base = OTHER; note = 2'-O-methyladenosine
  modified_base 21: mod_base = OTHER; note = 2'-O-methyladenosine
  source 1..21: mol_type = other RNA
tggcaagatcgtccactacaa

SEQ ID NO: 928 - RNA, 21 nt, synthetic construct
  modified_base 1: mod_base = um
  modified_base 2: mod_base = gm
  modified_base 3: mod_base = gm
  modified_base 4: mod_base = cm
  modified_base 5: mod_base = OTHER; note = 2'-O-methyladenosine
  modified_base 6: mod_base = OTHER; note = 2'-O-methyladenosine
  modified_base 7: mod_base = OTHER; note = 2'-fluoroguanosine
  modified_base 8: mod_base = OTHER; note = 2'-O-methyladenosine
  modified_base 9: mod_base = OTHER; note = 2'-fluorouridine
  modified_base 10: mod_base = cm
  modified_base 11: mod_base = OTHER; note = 2'-fluoroguanosine
  modified_base 12: mod_base = um
  modified_base 13: mod_base = cm
  modified_base 14: mod_base = cm
  modified_base 15: mod_base = OTHER; note = 2'-O-methyladenosine
  modified_base 16: mod_base = cm
  modified_base 17: mod_base = um
  modified_base 18: mod_base = OTHER; note = 2'-O-methyladenosine
  modified_base 19: mod_base = cm
  modified_base 20: mod_base = OTHER; note = 2'-O-methyladenosine
  modified_base 21: mod_base = OTHER; note = 2'-O-methyladenosine
  source 1..21: mol_type = other RNA
tggcaagatcgtccactacaa

SEQ ID NO: 929 - RNA, 21 nt, synthetic construct
  modified_base 1: mod_base = gm
  modified_base 2: mod_base = um
  modified_base 3: mod_base = cm
  modified_base 4: mod_base = cm
  modified_base 5: mod_base = um
  modified_base 6: mod_base = cm
  modified_base 7: mod_base = gm
  modified_base 8: mod_base = gm
  modified_base 9: mod_base = OTHER; note = 2'-fluorouridine
  modified_base 10: mod_base = OTHER; note = 2'-O-methyladenosine
  modified_base 11: mod_base = OTHER; note = 2'-fluorouridine
  modified_base 12: mod_base = um
  modified_base 13: mod_base = OTHER; note = 2'-fluorouridine
  modified_base 14: mod_base = OTHER; note = 2'-O-methyladenosine
  modified_base 15: mod_base = um
  modified_base 16: mod_base = um
  modified_base 17: mod_base = gm
  modified_base 18: mod_base = um
  modified_base 19: mod_base = cm
  modified_base 20: mod_base = um
  modified_base 21: mod_base = OTHER; note = 2'-O-methyladenosine
  source 1..21: mol_type = other RNA
gtcctcggtatttattgtcta

SEQ ID NO: 930 - RNA, 21 nt, synthetic construct
  modified_base 1: mod_base = um
  modified_base 2: mod_base = um
  modified_base 3: mod_base = cm
  modified_base 4: mod_base = cm
  modified_base 5: mod_base = um
  modified_base 6: mod_base = cm
  modified_base 7: mod_base = gm
  modified_base 8: mod_base = gm
  modified_base 9: mod_base = OTHER; note = 2'-fluorouridine
  modified_base 10: mod_base = OTHER; note = 2'-O-methyladenosine
  modified_base 11: mod_base = OTHER; note = 2'-fluorouridine
  modified_base 12: mod_base = OTHER; note = 2'-fluorouridine
  modified_base 13: mod_base = um
  modified_base 14: mod_base = OTHER; note = 2'-O-methyladenosine
  modified_base 15: mod_base = um
  modified_base 16: mod_base = um
  modified_base 17: mod_base = gm
  modified_base 18: mod_base = um
  modified_base 19: mod_base = cm
  modified_base 20: mod_base = um
  modified_base 21: mod_base = OTHER; note = 2'-O-methyladenosine
  source 1..21: mol_type = other RNA
ttcctcggtatttattgtcta

SEQ ID NO: 931 - RNA, 21 nt, synthetic construct
  modified_base 1: mod_base = OTHER; note = 2'-O-methyladenosine
  modified_base 2: mod_base = cm
  modified_base 3: mod_base = OTHER; note = 2'-O-methyladenosine
  modified_base 4: mod_base = OTHER; note = 2'-O-methyladenosine
  modified_base 5: mod_base = gm
  modified_base 6: mod_base = um
  modified_base 7: mod_base = gm
  modified_base 8: mod_base = gm
  modified_base 9: mod_base = OTHER; note = 2'-fluoroguanosine
  modified_base 10: mod_base = OTHER; note = 2'-fluoroadenosine
  modified_base 11: mod_base = OTHER; note = 2'-fluorocytidine
  modified_base 12: mod_base = OTHER; note = 2'-O-methyladenosine
  modified_base 13: mod_base = um
  modified_base 14: mod_base = gm
  modified_base 15: mod_base = cm
  modified_base 16: mod_base = um
  modified_base 17: mod_base = OTHER; note = 2'-O-methylinosine
  modified_base 18: mod_base = OTHER; note = 2'-O-methyladenosine
  modified_base 19: mod_base = OTHER; note = 2'-O-methyladenosine
  modified_base 20: mod_base = gm
  modified_base 21: mod_base = OTHER; note = 2'-O-methyladenosine
  source 1..21: mol_type = other RNA
acaagtgggacatgctnaaga

SEQ ID NO: 932 - RNA, 21 nt, synthetic construct
  modified_base 1: mod_base = cm
  modified_base 2: mod_base = OTHER; note = 2'-O-methyladenosine
  modified_base 3: mod_base = OTHER; note = 2'-O-methyladenosine
  modified_base 4: mod_base = gm
  modified_base 5: mod_base = um
  modified_base 6: mod_base = gm
  modified_base 7: mod_base = gm
  modified_base 8: mod_base = gm
  modified_base 9: mod_base = OTHER; note = 2'-fluoroadenosine
  modified_base 10: mod_base = OTHER; note = 2'-fluorocytidine
  modified_base 11: mod_base = OTHER; note = 2'-fluoroadenosine
  modified_base 12: mod_base = um
  modified_base 13: mod_base = gm
  modified_base 14: mod_base = cm
  modified_base 15: mod_base = um
  modified_base 16: mod_base = OTHER; note = 2'-O-methylinosine
  modified_base 17: mod_base = OTHER; note = 2'-O-methyladenosine
  modified_base 18: mod_base = OTHER; note = 2'-O-methyladenosine
  modified_base 19: mod_base = gm
  modified_base 20: mod_base = OTHER; note = 2'-O-methyladenosine
  modified_base 21: mod_base = OTHER; note = 2'-O-methyladenosine
  source 1..21: mol_type = other RNA
caagtgggacatgctnaagaa

SEQ ID NO: 933 - RNA, 21 nt, synthetic construct
  modified_base 1: mod_base = cm
  modified_base 2: mod_base = um
  modified_base 3: mod_base = um
  modified_base 4: mod_base = cm
  modified_base 5: mod_base = cm
  modified_base 6: mod_base = OTHER; note = 2'-O-methyladenosine
  modified_base 7: mod_base = gm
  modified_base 8: mod_base = gm
  modified_base 9: mod_base = OTHER; note = 2'-fluoroadenosine
  modified_base 10: mod_base = OTHER; note = 2'-fluorouridine
  modified_base 11: mod_base = OTHER; note = 2'-fluoroguanosine
  modified_base 12: mod_base = OTHER; note = 2'-O-methyladenosine
  modified_base 13: mod_base = gm
  modified_base 14: mod_base = OTHER; note = 2'-O-methyladenosine
  modified_base 15: mod_base = OTHER; note = 2'-O-methyladenosine
  modified_base 16: mod_base = cm
  modified_base 17: mod_base = um
  modified_base 18: mod_base = OTHER; note = 2'-O-methyladenosine
  modified_base 19: mod_base = cm
  modified_base 20: mod_base = um
  modified_base 21: mod_base = um
  source 1..21: mol_type = other RNA
cttccaggatgagaactactt

SEQ ID NO: 934 - RNA, 21 nt, synthetic construct
  modified_base 1: mod_base = cm
  modified_base 2: mod_base = um
  modified_base 3: mod_base = um
  modified_base 4: mod_base = cm
  modified_base 5: mod_base = cm
  modified_base 6: mod_base = OTHER; note = 2'-O-methyladenosine
  modified_base 7: mod_base = gm
  modified_base 8: mod_base = gm
  modified_base 9: mod_base = OTHER; note = 2'-fluoroadenosine
  modified_base 10: mod_base = OTHER; note = 2'-fluorouridine
  modified_base 11: mod_base = OTHER; note = 2'-fluoroguanosine
  modified_base 12: mod_base = OTHER; note = 2'-O-methyladenosine
  modified_base 13: mod_base = gm
  modified_base 14: mod_base = OTHER; note = 2'-O-methyladenosine
  modified_base 15: mod_base = OTHER; note = 2'-O-methyladenosine
  modified_base 16: mod_base = cm
  modified_base 17: mod_base = um
  modified_base 18: mod_base = OTHER; note = 2'-O-methyladenosine
  modified_base 19: mod_base = um
  modified_base 20: mod_base = cm
  modified_base 21: mod_base = um
  source 1..21: mol_type = other RNA
cttccaggatgagaactatct

SEQ ID NO: 935 - RNA, 21 nt, synthetic construct
  modified_base 1: mod_base = um
  modified_base 2: mod_base = cm
  modified_base 3: mod_base = cm
  modified_base 4: mod_base = OTHER; note = 2'-O-methyladenosine
  modified_base 5: mod_base = gm
  modified_base 6: mod_base = gm
  modified_base 7: mod_base = OTHER; note = 2'-O-methyladenosine
  modified_base 8: mod_base = um
  modified_base 9: mod_base = OTHER; note = 2'-fluoroguanosine
  modified_base 10: mod_base = OTHER; note = 2'-fluoroadenosine
  modified_base 11: mod_base = OTHER; note = 2'-fluoroguanosine
  modified_base 12: mod_base = OTHER; note = 2'-O-methyladenosine
  modified_base 13: mod_base = OTHER; note = 2'-O-methyladenosine
  modified_base 14: mod_base = cm
  modified_base 15: mod_base = um
  modified_base 16: mod_base = OTHER; note = 2'-O-methyladenosine
  modified_base 17: mod_base = cm
  modified_base 18: mod_base = cm
  modified_base 19: mod_base = um
  modified_base 20: mod_base = OTHER; note = 2'-O-methylinosine
  modified_base 21: mod_base = um
  source 1..21: mol_type = other RNA
tccaggatgagaactacctnt

SEQ ID NO: 936 - RNA, 21 nt, synthetic construct
  modified_base 1: mod_base = um
  modified_base 2: mod_base = cm
  modified_base 3: mod_base = cm
  modified_base 4: mod_base = OTHER; note = 2'-O-methyladenosine
  modified_base 5: mod_base = gm
  modified_base 6: mod_base = gm
  modified_base 7: mod_base = OTHER; note = 2'-O-methyladenosine
  modified_base 8: mod_base = um
  modified_base 9: mod_base = OTHER; note = 2'-fluoroguanosine
  modified_base 10: mod_base = OTHER; note = 2'-fluoroadenosine
  modified_base 11: mod_base = OTHER; note = 2'-fluoroguanosine
  modified_base 12: mod_base = OTHER; note = 2'-O-methyladenosine
  modified_base 13: mod_base = OTHER; note = 2'-O-methyladenosine
  modified_base 14: mod_base = cm
  modified_base 15: mod_base = um
  modified_base 16: mod_base = OTHER; note = 2'-O-methyladenosine
  modified_base 17: mod_base = cm
  modified_base 18: mod_base = um
  modified_base 19: mod_base = um
  modified_base 20: mod_base = gm
  modified_base 21: mod_base = um
  source 1..21: mol_type = other RNA
tccaggatgagaactacttgt

SEQ ID NO: 937 - RNA, 21 nt, synthetic construct
  modified_base 1: mod_base = OTHER; note = 2'-O-methyladenosine
  modified_base 2: mod_base = gm
  modified_base 3: mod_base = gm
  modified_base 4: mod_base = OTHER; note = 2'-O-methyladenosine
  modified_base 5: mod_base = um
  modified_base 6: mod_base = gm
  modified_base 7: mod_base = OTHER; note = 2'-O-methyladenosine
  modified_base 8: mod_base = gm
  modified_base 9: mod_base = OTHER; note = 2'-fluoroadenosine
  modified_base 10: mod_base = OTHER; note = 2'-fluoroadenosine
  modified_base 11: mod_base = OTHER; note = 2'-fluorocytidine
  modified_base 12: mod_base = um
  modified_base 13: mod_base = OTHER; note = 2'-O-methyladenosine
  modified_base 14: mod_base = cm
  modified_base 15: mod_base = cm
  modified_base 16: mod_base = um
  modified_base 17: mod_base = OTHER; note = 2'-O-methylinosine
  modified_base 18: mod_base = um
  modified_base 19: mod_base = OTHER; note = 2'-O-methyladenosine
  modified_base 20: mod_base = cm
  modified_base 21: mod_base = OTHER; note = 2'-O-methyladenosine
  source 1..21: mol_type = other RNA
aggatgagaactacctntaca

SEQ ID NO: 938 - RNA, 21 nt, synthetic construct
  modified_base 1: mod_base = cm
  modified_base 2: mod_base = um
  modified_base 3: mod_base = OTHER; note = 2'-O-methyladenosine
  modified_base 4: mod_base = cm
  modified_base 5: mod_base = cm
  modified_base 6: mod_base = um
  modified_base 7: mod_base = gm
  modified_base 8: mod_base = um
  modified_base 9: mod_base = OTHER; note = 2'-fluoroadenosine
  modified_base 10: mod_base = OTHER; note = 2'-fluorocytidine
  modified_base 11: mod_base = OTHER; note = 2'-fluorocytidine
  modified_base 12: mod_base = um
  modified_base 13: mod_base = gm
  modified_base 14: mod_base = gm
  modified_base 15: mod_base = um
  modified_base 16: mod_base = cm
  modified_base 17: mod_base = OTHER; note = 2'-O-methyladenosine
  modified_base 18: mod_base = um
  modified_base 19: mod_base = OTHER; note = 2'-O-methylinosine
  modified_base 20: mod_base = gm
  modified_base 21: mod_base = OTHER; note = 2'-O-methyladenosine
  source 1..21: mol_type = other RNA
ctacctgtacctggtcatnga

SEQ ID NO: 939 - RNA, 21 nt, synthetic construct
  modified_base 1: mod_base = cm
  modified_base 2: mod_base = um
  modified_base 3: mod_base = OTHER; note = 2'-O-methyladenosine
  modified_base 4: mod_base = cm
  modified_base 5: mod_base = cm
  modified_base 6: mod_base = um
  modified_base 7: mod_base = gm
  modified_base 8: mod_base = um
  modified_base 9: mod_base = OTHER; note = 2'-fluoroadenosine
  modified_base 10: mod_base = OTHER; note = 2'-fluorocytidine
  modified_base 11: mod_base = OTHER; note = 2'-fluorocytidine
  modified_base 12: mod_base = um
  modified_base 13: mod_base = gm
  modified_base 14: mod_base = gm
  modified_base 15: mod_base = um
  modified_base 16: mod_base = um
  modified_base 17: mod_base = OTHER; note = 2'-O-methyladenosine
  modified_base 18: mod_base = um
  modified_base 19: mod_base = gm
  modified_base 20: mod_base = gm
  modified_base 21: mod_base = OTHER; note = 2'-O-methyladenosine
  source 1..21: mol_type = other RNA
ctacctgtacctggttatgga

SEQ ID NO: 940 - RNA, 21 nt, synthetic construct
  modified_base 1: mod_base = OTHER; note = 2'-O-methyladenosine
  modified_base 2: mod_base = cm
  modified_base 3: mod_base = OTHER; note = 2'-O-methyladenosine
  modified_base 4: mod_base = cm
  modified_base 5: mod_base = um
  modified_base 6: mod_base = gm
  modified_base 7: mod_base = cm
  modified_base 8: mod_base = um
  modified_base 9: mod_base = OTHER; note = 2'-fluoroguanosine
  modified_base 10: mod_base = OTHER; note = 2'-fluoroadenosine
  modified_base 11: mod_base = OTHER; note = 2'-fluoroguanosine
  modified_base 12: mod_base = cm
  modified_base 13: mod_base = OTHER; note = 2'-O-methyladenosine
  modified_base 14: mod_base = OTHER; note = 2'-O-methyladenosine
  modified_base 15: mod_base = gm
  modified_base 16: mod_base = um
  modified_base 17: mod_base = um
  modified_base 18: mod_base = um
  modified_base 19: mod_base = OTHER; note = 2'-O-methylinosine
  modified_base 20: mod_base = gm
  modified_base 21: mod_base = OTHER; note = 2'-O-methyladenosine
  source 1..21: mol_type = other RNA
acactgctgagcaagtttnga

SEQ ID NO: 941 - RNA, 21 nt, synthetic construct
  modified_base 1: mod_base = cm
  modified_base 2: mod_base = um
  modified_base 3: mod_base = OTHER; note = 2'-O-methyladenosine
  modified_base 4: mod_base = cm
  modified_base 5: mod_base = OTHER; note = 2'-O-methyladenosine
  modified_base 6: mod_base = OTHER; note = 2'-O-methyladenosine
  modified_base 7: mod_base = gm
  modified_base 8: mod_base = gm
  modified_base 9: mod_base = OTHER; note = 2'-fluoroadenosine
  modified_base 10: mod_base = OTHER; note = 2'-fluoroguanosine
  modified_base 11: mod_base = OTHER; note = 2'-fluorocytidine
  modified_base 12: mod_base = OTHER; note = 2'-O-methyladenosine
  modified_base 13: mod_base = cm
  modified_base 14: mod_base = cm
  modified_base 15: mod_base = um
  modified_base 16: mod_base = cm
  modified_base 17: mod_base = um
  modified_base 18: mod_base = um
  modified_base 19: mod_base = um
  modified_base 20: mod_base = cm
  modified_base 21: mod_base = um
  source 1..21: mol_type = other RNA
ctacaaggagcacctctttct

SEQ ID NO: 942 - RNA, 21 nt, synthetic construct
  modified_base 1: mod_base = cm
  modified_base 2: mod_base = um
  modified_base 3: mod_base = OTHER; note = 2'-O-methyladenosine
  modified_base 4: mod_base = cm
  modified_base 5: mod_base = OTHER; note = 2'-O-methyladenosine
  modified_base 6: mod_base = OTHER; note = 2'-O-methyladenosine
  modified_base 7: mod_base = gm
  modified_base 8: mod_base = gm
  modified_base 9: mod_base = OTHER; note = 2'-fluoroadenosine
  modified_base 10: mod_base = OTHER; note = 2'-fluoroguanosine
  modified_base 11: mod_base = OTHER; note = 2'-fluorocytidine
  modified_base 12: mod_base = OTHER; note = 2'-O-methyladenosine
  modified_base 13: mod_base = cm
  modified_base 14: mod_base = cm
  modified_base 15: mod_base = um
  modified_base 16: mod_base = um
  modified_base 17: mod_base = um
  modified_base 18: mod_base = cm
  modified_base 19: mod_base = um
  modified_base 20: mod_base = cm
  modified_base 21: mod_base = um
  source 1..21: mol_type = other RNA
ctacaaggagcacctttctct

SEQ ID NO: 943 - RNA, 21 nt, synthetic construct
  modified_base 1: mod_base = cm
  modified_base 2: mod_base = gm
  modified_base 3: mod_base = gm
  modified_base 4: mod_base = OTHER; note = 2'-O-methyladenosine
  modified_base 5: mod_base = cm
  modified_base 6: mod_base = OTHER; note = 2'-O-methyladenosine
  modified_base 7: mod_base = cm
  modified_base 8: mod_base = OTHER; note = 2'-O-methyladenosine
  modified_base 9: mod_base = OTHER; note = 2'-fluorouridine
  modified_base 10: mod_base = OTHER; note = 2'-fluorocytidine
  modified_base 11: mod_base = OTHER; note = 2'-fluorocytidine
  modified_base 12: mod_base = cm
  modified_base 13: mod_base = um
  modified_base 14: mod_base = um
  modified_base 15: mod_base = cm
  modified_base 16: mod_base = um
  modified_base 17: mod_base = um
  modified_base 18: mod_base = cm
  modified_base 19: mod_base = um
  modified_base 20: mod_base = um
  modified_base 21: mod_base = um
  source 1..21: mol_type = other RNA
cggacacatcccttcttcttt

SEQ ID NO: 944 - RNA, 21 nt, synthetic construct
  modified_base 1: mod_base = gm
  modified_base 2: mod_base = OTHER; note = 2'-O-methyladenosine
  modified_base 3: mod_base = cm
  modified_base 4: mod_base = OTHER; note = 2'-O-methyladenosine
  modified_base 5: mod_base = cm
  modified_base 6: mod_base = OTHER; note = 2'-O-methyladenosine
  modified_base 7: mod_base = um
  modified_base 8: mod_base = cm
  modified_base 9: mod_base = OTHER; note = 2'-fluorocytidine
  modified_base 10: mod_base = OTHER; note = 2'-fluorocytidine
  modified_base 11: mod_base = OTHER; note = 2'-fluorouridine
  modified_base 12: mod_base = um
  modified_base 13: mod_base = cm
  modified_base 14: mod_base = um
  modified_base 15: mod_base = um
  modified_base 16: mod_base = cm
  modified_base 17: mod_base = um
  modified_base 18: mod_base = um
  modified_base 19: mod_base = um
  modified_base 20: mod_base = gm
  modified_base 21: mod_base = OTHER; note = 2'-O-methyladenosine
  source 1..21: mol_type = other RNA
gacacatcccttcttctttga

SEQ ID NO: 945 - RNA, 21 nt, synthetic construct
  modified_base 1: mod_base = cm
  modified_base 2: mod_base = cm
  modified_base 3: mod_base = um
  modified_base 4: mod_base = um
  modified_base 5: mod_base = um
  modified_base 6: mod_base = OTHER; note = 2'-O-methyladenosine
  modified_base 7: mod_base = cm
  modified_base 8: mod_base = OTHER; note = 2'-O-methyladenosine
  modified_base 9: mod_base = OTHER; note = 2'-fluorocytidine
  modified_base 10: mod_base = OTHER; note = 2'-fluorocytidine
  modified_base 11: mod_base = OTHER; note = 2'-fluoroguanosine
  modified_base 12: mod_base = gm
  modified_base 13: mod_base = OTHER; note = 2'-O-methyladenosine
  modified_base 14: mod_base = um
  modified_base 15: mod_base = um
  modified_base 16: mod_base = um
  modified_base 17: mod_base = cm
  modified_base 18: mod_base = gm
  modified_base 19: mod_base = OTHER; note = 2'-O-methyladenosine
  modified_base 20: mod_base = OTHER; note = 2'-O-methyladenosine
  modified_base 21: mod_base = OTHER; note = 2'-O-methyladenosine
  source 1..21: mol_type = other RNA
cctttacaccggatttcgaaa

SEQ ID NO: 946 - RNA, 21 nt, synthetic construct
  modified_base 1: mod_base = um
  modified_base 2: mod_base = OTHER; note = 2'-O-methyladenosine
  modified_base 3: mod_base = cm
  modified_base 4: mod_base = OTHER; note = 2'-O-methyladenosine
  modified_base 5: mod_base = cm
  modified_base 6: mod_base = cm
  modified_base 7: mod_base = gm
  modified_base 8: mod_base = gm
  modified_base 9: mod_base = OTHER; note = 2'-fluoroadenosine
  modified_base 10: mod_base = OTHER; note = 2'-fluorouridine
  modified_base 11: mod_base = OTHER; note = 2'-fluorouridine
  modified_base 12: mod_base = um
  modified_base 13: mod_base = cm
  modified_base 14: mod_base = gm
  modified_base 15: mod_base = OTHER; note = 2'-O-methyladenosine
  modified_base 16: mod_base = OTHER; note = 2'-O-methyladenosine
  modified_base 17: mod_base = gm
  modified_base 18: mod_base = OTHER; note = 2'-O-methylinosine
  modified_base 19: mod_base = um
  modified_base 20: mod_base = gm
  modified_base 21: mod_base = OTHER; note = 2'-O-methyladenosine
  source 1..21: mol_type = other RNA
tacaccggatttcgaagntga

SEQ ID NO: 947 - RNA, 21 nt, synthetic construct
  modified_base 1: mod_base = cm
  modified_base 2: mod_base = OTHER; note = 2'-O-methyladenosine
  modified_base 3: mod_base = cm
  modified_base 4: mod_base = cm
  modified_base 5: mod_base = gm
  modified_base 6: mod_base = OTHER; note = 2'-O-methyladenosine
  modified_base 7: mod_base = cm
  modified_base 8: mod_base = OTHER; note = 2'-O-methyladenosine
  modified_base 9: mod_base = OTHER; note = 2'-fluorocytidine
  modified_base 10: mod_base = OTHER; note = 2'-fluoroadenosine
  modified_base 11: mod_base = OTHER; note = 2'-fluorouridine
  modified_base 12: mod_base = gm
  modified_base 13: mod_base = cm
  modified_base 14: mod_base = OTHER; note = 2'-O-methyladenosine
  modified_base 15: mod_base = OTHER; note = 2'-O-methyladenosine
  modified_base 16: mod_base = cm
  modified_base 17: mod_base = um
  modified_base 18: mod_base = um
  modified_base 19: mod_base = cm
  modified_base 20: mod_base = OTHER; note = 2'-O-methylinosine
  modified_base 21: mod_base = OTHER; note = 2'-O-methyladenosine
  source 1..21: mol_type = other RNA
caccgacacatgcaacttcna

SEQ ID NO: 948 - RNA, 21 nt, synthetic construct
  modified_base 1: mod_base = cm
  modified_base 2: mod_base = cm
  modified_base 3: mod_base = gm
  modified_base 4: mod_base = OTHER; note = 2'-O-methyladenosine
  modified_base 5: mod_base = cm
  modified_base 6: mod_base = OTHER; note = 2'-O-methyladenosine
  modified_base 7: mod_base = cm
  modified_base 8: mod_base = OTHER; note = 2'-O-methyladenosine
  modified_base 9: mod_base = OTHER; note = 2'-fluorouridine
  modified_base 10: mod_base = OTHER; note = 2'-fluoroguanosine
  modified_base 11: mod_base = OTHER; note = 2'-fluorocytidine
  modified_base 12: mod_base = OTHER; note = 2'-O-methyladenosine
  modified_base 13: mod_base = OTHER; note = 2'-O-methyladenosine
  modified_base 14: mod_base = cm
  modified_base 15: mod_base = um
  modified_base 16: mod_base = um
  modified_base 17: mod_base = cm
  modified_base 18: mod_base = OTHER; note = 2'-O-methylinosine
  modified_base 19: mod_base = OTHER; note = 2'-O-methyladenosine
  modified_base 20: mod_base = cm
  modified_base 21: mod_base = um
  source 1..21: mol_type = other RNA
ccgacacatgcaacttcnact

SEQ ID NO: 949 - RNA, 21 nt, synthetic construct
  modified_base 1: mod_base = OTHER; note = 2'-O-methyladenosine
  modified_base 2: mod_base = cm
  modified_base 3: mod_base = OTHER; note = 2'-O-methyladenosine
  modified_base 4: mod_base = um
  modified_base 5: mod_base = gm
  modified_base 6: mod_base = cm
  modified_base 7: mod_base = OTHER; note = 2'-O-methyladenosine
  modified_base 8: mod_base = OTHER; note = 2'-O-methyladenosine
  modified_base 9: mod_base = OTHER; note = 2'-fluorocytidine
  modified_base 10: mod_base = OTHER; note = 2'-fluorouridine
  modified_base 11: mod_base = OTHER; note = 2'-fluorouridine
  modified_base 12: mod_base = cm
  modified_base 13: mod_base = gm
  modified_base 14: mod_base = OTHER; note = 2'-O-methyladenosine
  modified_base 15: mod_base = cm
  modified_base 16: mod_base = um
  modified_base 17: mod_base = um
  modified_base 18: mod_base = OTHER; note = 2'-O-methylinosine
  modified_base 19: mod_base = gm
  modified_base 20: mod_base = um
  modified_base 21: mod_base = OTHER; note = 2'-O-methyladenosine
  source 1..21: mol_type = other RNA
acatgcaacttcgacttngta

SEQ ID NO: 950 - RNA, 21 nt, synthetic construct
  modified_base 1: mod_base = cm
  modified_base 2: mod_base = cm
  modified_base 3: mod_base = um
  modified_base 4: mod_base = gm
  modified_base 5: mod_base = gm
  modified_base 6: mod_base = um
  modified_base 7: mod_base = cm
  modified_base 8: mod_base = OTHER; note = 2'-O-methyladenosine
  modified_base 9: mod_base = OTHER; note = 2'-fluorouridine
  modified_base 10: mod_base = gm
  modified_base 11: mod_base = OTHER; note = 2'-fluoroguanosine
  modified_base 12: mod_base = OTHER; note = 2'-fluoroadenosine
  modified_base 13: mod_base = gm
  modified_base 14: mod_base = um
  modified_base 15: mod_base = OTHER; note = 2'-O-methyladenosine
  modified_base 16: mod_base = um
  modified_base 17: mod_base = um
  modified_base 18: mod_base = OTHER; note = 2'-O-methyladenosine
  modified_base 19: mod_base = cm
  modified_base 20: mod_base = gm
  modified_base 21: mod_base = um
  source 1..21: mol_type = other RNA
cctggtcatggagtattacgt

SEQ ID NO: 951 - RNA, 21 nt, synthetic construct
  modified_base 1: mod_base = cm
  modified_base 2: mod_base = cm
  modified_base 3: mod_base = um
  modified_base 4: mod_base = cm
  modified_base 5: mod_base = gm
  modified_base 6: mod_base = gm
  modified_base 7: mod_base = um
  modified_base 8: mod_base = OTHER; note = 2'-O-methyladenosine
  modified_base 9: mod_base = OTHER; note = 2'-fluorouridine
  modified_base 10: mod_base = OTHER; note = 2'-fluorouridine
  modified_base 11: mod_base = OTHER; note = 2'-fluorouridine
  modified_base 12: mod_base = OTHER; note = 2'-O-methyladenosine
  modified_base 13: mod_base = um
  modified_base 14: mod_base = um
  modified_base 15: mod_base = gm
  modified_base 16: mod_base = um
  modified_base 17: mod_base = um
  modified_base 18: mod_base = um
  modified_base 19: mod_base = gm
  modified_base 20: mod_base = um
  modified_base 21: mod_base = OTHER; note = 2'-O-methyladenosine
  source 1..21: mol_type = other RNA
cctcggtatttattgtttgta

SEQ ID NO: 952 - RNA, 21 nt, synthetic construct
  modified_base 1: mod_base = cm
  modified_base 2: mod_base = cm
  modified_base 3: mod_base = um
  modified_base 4: mod_base = cm
  modified_base 5: mod_base = gm
  modified_base 6: mod_base = gm
  modified_base 7: mod_base = um
  modified_base 8: mod_base = OTHER; note = 2'-O-methyladenosine
  modified_base 9: mod_base = OTHER; note = 2'-fluorouridine
  modified_base 10: mod_base = OTHER; note = 2'-fluorouridine
  modified_base 11: mod_base = OTHER; note = 2'-fluorouridine
  modified_base 12: mod_base = OTHER; note = 2'-O-methyladenosine
  modified_base 13: mod_base = um
  modified_base 14: mod_base = um
  modified_base 15: mod_base = gm
  modified_base 16: mod_base = um
  modified_base 17: mod_base = cm
  modified_base 18: mod_base = um
  modified_base 19: mod_base = gm
  modified_base 20: mod_base = um
  modified_base 21: mod_base = OTHER; note = 2'-O-methyladenosine
  source 1..21: mol_type = other RNA
cctcggtatttattgtctgta

SEQ ID NO: 953 - RNA, 21 nt, synthetic construct
  modified_base 1: mod_base = cm
  modified_base 2: mod_base = cm
  modified_base 3: mod_base = um
  modified_base 4: mod_base = cm
  modified_base 5: mod_base = gm
  modified_base 6: mod_base = gm
  modified_base 7: mod_base = um
  modified_base 8: mod_base = OTHER; note = 2'-O-methyladenosine
  modified_base 9: mod_base = OTHER; note = 2'-fluorouridine
  modified_base 10: mod_base = OTHER; note = 2'-fluorouridine
  modified_base 11: mod_base = OTHER; note = 2'-fluorouridine
  modified_base 12: mod_base = OTHER; note = 2'-O-methyladenosine
  modified_base 13: mod_base = um
  modified_base 14: mod_base = um
  modified_base 15: mod_base = gm
  modified_base 16: mod_base = um
  modified_base 17: mod_base = cm
  modified_base 18: mod_base = um
  modified_base 19: mod_base = OTHER; note = 2'-O-methylinosine
  modified_base 20: mod_base = um
  modified_base 21: mod_base = OTHER; note = 2'-O-methyladenosine
  source 1..21: mol_type = other RNA
cctcggtatttattgtctnta

SEQ ID NO: 954 - RNA, 21 nt, synthetic construct
  modified_base 1: mod_base = cm
  modified_base 2: mod_base = cm
  modified_base 3: mod_base = um
  modified_base 4: mod_base = gm
  modified_base 5: mod_base = gm
  modified_base 6: mod_base = um
  modified_base 7: mod_base = cm
  modified_base 8: mod_base = OTHER; note = 2'-O-methyladenosine
  modified_base 9: mod_base = OTHER; note = 2'-fluorouridine
  modified_base 10: mod_base = gm
  modified_base 11: mod_base = OTHER; note = 2'-fluoroguanosine
  modified_base 12: mod_base = OTHER; note = 2'-fluoroadenosine
  modified_base 13: mod_base = gm
  modified_base 14: mod_base = um
  modified_base 15: mod_base = OTHER; note = 2'-O-methyladenosine
  modified_base 16: mod_base = um
  modified_base 17: mod_base = um
  modified_base 18: mod_base = OTHER; note = 2'-O-methyladenosine
  modified_base 19: mod_base = cm
  modified_base 20: mod_base = gm
  modified_base 21: mod_base = OTHER; note = 2'-O-methyladenosine
  source 1..21: mol_type = other RNA
cctggtcatggagtattacga

SEQ ID NO: 955 - RNA, 19 nt, synthetic construct
  modified_base 1: mod_base = cm
  modified_base 1^2: mod_base = OTHER; note = phosphorothioate linkage
  modified_base 2: mod_base = cm
  modified_base 2^3: mod_base = OTHER; note = phosphorothioate linkage
  modified_base 3: mod_base = cm
  modified_base 4: mod_base = um
  modified_base 5: mod_base = OTHER; note = 2'-O-methyladenosine
  modified_base 6: mod_base = gm
  modified_base 7: mod_base = OTHER; note = 2'-fluoroadenosine
  modified_base 8: mod_base = OTHER; note = 2'-fluoroadenosine
  modified_base 9: mod_base = OTHER; note = 2'-fluorocytidine
  modified_base 10: mod_base = um
  modified_base 11: mod_base = gm
  modified_base 12: mod_base = um
  modified_base 13: mod_base = cm
  modified_base 14: mod_base = um
  modified_base 15: mod_base = um
  modified_base 16: mod_base = cm
  modified_base 17: mod_base = gm
  modified_base 17^18: mod_base = OTHER; note = phosphorothioate linkage
  modified_base 18: mod_base = OTHER; note = 2'-O-methyladenosine
  modified_base 18^19: mod_base = OTHER; note = phosphorothioate linkage
  modified_base 19: mod_base = OTHER; note = 2'-O-methyladenosine
  source 1..19: mol_type = other RNA
ccctagaactgtcttcgaa

SEQ ID NO: 956 - RNA, 21 nt, synthetic construct
  modified_base 1: mod_base = um
  modified_base 2: mod_base = um
  modified_base 3: mod_base = cm
  modified_base 4: mod_base = cm
  modified_base 5: mod_base = um
  modified_base 6: mod_base = cm
  modified_base 7: mod_base = gm
  modified_base 8: mod_base = gm
  modified_base 9: mod_base = OTHER; note = 2'-fluorouridine
  modified_base 10: mod_base = OTHER; note = 2'-O-methyladenosine
  modified_base 11: mod_base = OTHER; note = 2'-fluorouridine
  modified_base 12: mod_base = OTHER; note = 2'-fluorouridine
  modified_base 13: mod_base = um
  modified_base 14: mod_base = OTHER; note = 2'-O-methyladenosine
  modified_base 15: mod_base = um
  modified_base 16: mod_base = um
  modified_base 17: mod_base = gm
  modified_base 18: mod_base = um
  modified_base 19: mod_base = cm
  modified_base 20: mod_base = um
  modified_base 21: mod_base = OTHER; note = 2'-O-methyladenosine
  source 1..21: mol_type = other RNA
ttcctcggtatttattgtcta

SEQ ID NO: 957 - RNA, 21 nt, synthetic construct
  modified_base 1: mod_base = cm
  modified_base 2: mod_base = OTHER; note = 2'-O-methyladenosine
  modified_base 3: mod_base = cm
  modified_base 4: mod_base = cm
  modified_base 5: mod_base = gm
  modified_base 6: mod_base = OTHER; note = 2'-O-methyladenosine
  modified_base 7: mod_base = cm
  modified_base 8: mod_base = OTHER; note = 2'-O-methyladenosine
  modified_base 9: mod_base = OTHER; note = 2'-fluorocytidine
  modified_base 10: mod_base = OTHER; note = 2'-O-methyladenosine
  modified_base 11: mod_base = OTHER; note = 2'-fluorouridine
  modified_base 12: mod_base = gm
  modified_base 13: mod_base = OTHER; note = 2'-fluorocytidine
  modified_base 14: mod_base = OTHER; note = 2'-O-methyladenosine
  modified_base 15: mod_base = OTHER; note = 2'-O-methyladenosine
  modified_base 16: mod_base = cm
  modified_base 17: mod_base = um
  modified_base 18: mod_base = um
  modified_base 19: mod_base = cm
  modified_base 20: mod_base = OTHER; note = 2'-O-methylinosine
  modified_base 21: mod_base = OTHER; note = 2'-O-methyladenosine
  source 1..21: mol_type = other RNA
caccgacacatgcaacttcna

SEQ ID NO: 958 - RNA, 21 nt, synthetic construct
  modified_base 1: mod_base = gm
  modified_base 2: mod_base = OTHER; note = 2'-O-methyladenosine
  modified_base 3: mod_base = cm
  modified_base 4: mod_base = cm
  modified_base 5: mod_base = cm
  modified_base 6: mod_base = um
  modified_base 7: mod_base = OTHER; note = 2'-O-methyladenosine
  modified_base 8: mod_base = gm
  modified_base 9: mod_base = OTHER; note = 2'-fluoroadenosine
  modified_base 10: mod_base = OTHER; note = 2'-fluoroadenosine
  modified_base 11: mod_base = OTHER; note = 2'-fluorocytidine
  modified_base 12: mod_base = um
  modified_base 13: mod_base = gm
  modified_base 14: mod_base = um
  modified_base 15: mod_base = cm
  modified_base 16: mod_base = um
  modified_base 17: mod_base = um
  modified_base 18: mod_base = cm
  modified_base 19: mod_base = OTHER; note = 2'-O-methylinosine
  modified_base 20: mod_base = OTHER; note = 2'-O-methyladenosine
  modified_base 21: mod_base = OTHER; note = 2'-O-methyladenosine
  source 1..21: mol_type = other RNA
gaccctagaactgtcttcnaa

SEQ ID NO: 959 - RNA, 21 nt, synthetic construct
  modified_base 1: mod_base = gm
  modified_base 2: mod_base = OTHER; note = 2'-O-methyladenosine
  modified_base 3: mod_base = OTHER; note = 2'-O-methyladenosine
  modified_base 4: mod_base = cm
  modified_base 5: mod_base = cm
  modified_base 6: mod_base = cm
  modified_base 7: mod_base = um
  modified_base 8: mod_base = OTHER; note = 2'-O-methyladenosine
  modified_base 9: mod_base = OTHER; note = 2'-fluoroguanosine
  modified_base 10: mod_base = OTHER; note = 2'-fluoroadenosine
  modified_base 11: mod_base = OTHER; note = 2'-fluoroadenosine
  modified_base 12: mod_base = cm
  modified_base 13: mod_base = um
  modified_base 14: mod_base = gm
  modified_base 15: mod_base = um
  modified_base 16: mod_base = cm
  modified_base 17: mod_base = um
  modified_base 18: mod_base = um
  modified_base 19: mod_base = cm
  modified_base 20: mod_base = OTHER; note = 2'-O-methylinosine
  modified_base 21: mod_base = OTHER; note = 2'-O-methyladenosine
  source 1..21: mol_type = other RNA
gaaccctagaactgtcttcna

SEQ ID NO: 960 - RNA, 21 nt, synthetic construct
  modified_base 1: mod_base = um
  modified_base 2: mod_base = gm
  modified_base 3: mod_base = gm
  modified_base 4: mod_base = cm
  modified_base 5: mod_base = OTHER; note = 2'-O-methyladenosine
  modified_base 6: mod_base = OTHER; note = 2'-O-methyladenosine
  modified_base 7: mod_base = gm
  modified_base 8: mod_base = OTHER; note = 2'-O-methyladenosine
  modified_base 9: mod_base = OTHER; note = 2'-fluorouridine
  modified_base 10: mod_base = cm
  modified_base 11: mod_base = OTHER; note = 2'-fluoroguanosine
  modified_base 12: mod_base = OTHER; note = 2'-fluorouridine
  modified_base 13: mod_base = cm
  modified_base 14: mod_base = cm
  modified_base 15: mod_base = OTHER; note = 2'-O-methyladenosine
  modified_base 16: mod_base = cm
  modified_base 17: mod_base = um
  modified_base 18: mod_base = OTHER; note = 2'-O-methyladenosine
  modified_base 19: mod_base = cm
  modified_base 20: mod_base = OTHER; note = 2'-O-methyladenosine
  modified_base 21: mod_base = OTHER; note = 2'-O-methyladenosine
  source 1..21: mol_type = other RNA
tggcaagatcgtccactacaa

SEQ ID NO: 961 - RNA, 21 nt, synthetic construct
  modified_base 1: mod_base = um
  modified_base 2: mod_base = gm
  modified_base 3: mod_base = gm
  modified_base 4: mod_base = cm
  modified_base 5: mod_base = OTHER; note = 2'-O-methyladenosine
  modified_base 6: mod_base = OTHER; note = 2'-O-methyladenosine
  modified_base 7: mod_base = gm
  modified_base 8: mod_base = OTHER; note = 2'-O-methyladenosine
  modified_base 9: mod_base = OTHER; note = 2'-fluorouridine
  modified_base 10: mod_base = cm
  modified_base 11: mod_base = OTHER; note = 2'-fluoroguanosine
  modified_base 12: mod_base = um
  modified_base 13: mod_base = OTHER; note = 2'-fluorocytidine
  modified_base 14: mod_base = cm
  modified_base 15: mod_base = OTHER; note = 2'-O-methyladenosine
  modified_base 16: mod_base = cm
  modified_base 17: mod_base = um
  modified_base 18: mod_base = OTHER; note = 2'-O-methyladenosine
  modified_base 19: mod_base = cm
  modified_base 20: mod_base = OTHER; note = 2'-O-methyladenosine
  modified_base 21: mod_base = OTHER; note = 2'-O-methyladenosine
  source 1..21: mol_type = other RNA
tggcaagatcgtccactacaa

SEQ ID NO: 962 - RNA, 21 nt, synthetic construct
  modified_base 1: mod_base = cm
  modified_base 2: mod_base = cm
  modified_base 3: mod_base = um
  modified_base 4: mod_base = gm
  modified_base 5: mod_base = gm
  modified_base 6: mod_base = um
  modified_base 7: mod_base = cm
  modified_base 8: mod_base = OTHER; note = 2'-O-methyladenosine
  modified_base 9: mod_base = OTHER; note = 2'-fluorouridine
  modified_base 10: mod_base = gm
  modified_base 11: mod_base = OTHER; note = 2'-fluoroguanosine
  modified_base 12: mod_base = OTHER; note = 2'-fluoroadenosine
  modified_base 13: mod_base = gm
  modified_base 14: mod_base = um
  modified_base 15: mod_base = OTHER; note = 2'-O-methyladenosine
  modified_base 16: mod_base = um
  modified_base 17: mod_base = um
  modified_base 18: mod_base = OTHER; note = 2'-O-methyladenosine
  modified_base 19: mod_base = cm
  modified_base 20: mod_base = gm
  modified_base 21: mod_base = OTHER; note = 2'-O-methyladenosine
  source 1..21: mol_type = other RNA
cctggtcatggagtattacga

SEQ ID NO: 963 - RNA, 19 nt, synthetic construct
  modified_base 1: mod_base = cm
  modified_base 1^2: mod_base = OTHER; note = phosphorothioate linkage
  modified_base 2: mod_base = cm
  modified_base 2^3: mod_base = OTHER; note = phosphorothioate linkage
  modified_base 3: mod_base = cm
  modified_base 4: mod_base = um
  modified_base 5: mod_base = OTHER; note = 2'-O-methyladenosine
  modified_base 6: mod_base = gm
  modified_base 7: mod_base = OTHER; note = 2'-fluoroadenosine
  modified_base 8: mod_base = OTHER; note = 2'-fluoroadenosine
  modified_base 9: mod_base = OTHER; note = 2'-fluorocytidine
  modified_base 10: mod_base = um
  modified_base 11: mod_base = gm
  modified_base 12: mod_base = um
  modified_base 13: mod_base = cm
  modified_base 14: mod_base = um
  modified_base 15: mod_base = um
  modified_base 16: mod_base = cm
  modified_base 17: mod_base = gm
  modified_base 17^18: mod_base = OTHER; note = phosphorothioate linkage
  modified_base 18: mod_base = OTHER; note = 2'-O-methyladenosine
  modified_base 18^19: mod_base = OTHER; note = phosphorothioate linkage
  modified_base 19: mod_base = OTHER; note = 2'-O-methyladenosine
  source 1..19: mol_type = other RNA
ccctagaactgtcttcgaa

SEQ ID NO: 964 - RNA, 21 nt, synthetic construct
  modified_base 1: mod_base = cm
  modified_base 2: mod_base = cm
  modified_base 3: mod_base = um
  modified_base 4: mod_base = cm
  modified_base 5: mod_base = gm
  modified_base 6: mod_base = gm
  modified_base 7: mod_base = um
  modified_base 8: mod_base = OTHER; note = 2'-O-methyladenosine
  modified_base 9: mod_base = OTHER; note = 2'-fluorouridine
  modified_base 10: mod_base = um
  modified_base 11: mod_base = OTHER; note = 2'-fluorouridine
  modified_base 12: mod_base = OTHER; note = 2'-O-methyladenosine
  modified_base 13: mod_base = OTHER; note = 2'-fluorouridine
  modified_base 14: mod_base = um
  modified_base 15: mod_base = gm
  modified_base 16: mod_base = um
  modified_base 17: mod_base = cm
  modified_base 18: mod_base = um
  modified_base 19: mod_base = gm
  modified_base 20: mod_base = um
  modified_base 21: mod_base = OTHER; note = 2'-O-methyladenosine
  source 1..21: mol_type = other RNA
cctcggtatttattgtctgta

SEQ ID NO: 965 - RNA, 21 nt, synthetic construct
  modified_base 1: mod_base = cm
  modified_base 2: mod_base = cm
  modified_base 3: mod_base = um
  modified_base 4: mod_base = cm
  modified_base 5: mod_base = gm
  modified_base 6: mod_base = gm
  modified_base 7: mod_base = um
  modified_base 8: mod_base = OTHER; note = 2'-O-methyladenosine
  modified_base 9: mod_base = OTHER; note = 2'-fluorouridine
  modified_base 10: mod_base = um
  modified_base 11: mod_base = OTHER; note = 2'-fluorouridine
  modified_base 12: mod_base = OTHER; note = 2'-fluoroadenosine
  modified_base 13: mod_base = um
  modified_base 14: mod_base = um
  modified_base 15: mod_base = gm
  modified_base 16: mod_base = um
  modified_base 17: mod_base = cm
  modified_base 18: mod_base = um
  modified_base 19: mod_base = gm
  modified_base 20: mod_base = um
  modified_base 21: mod_base = OTHER; note = 2'-O-methyladenosine
  source 1..21: mol_type = other RNA
cctcggtatttattgtctgta

SEQ ID NO: 966 - RNA, 21 nt, synthetic construct
  modified_base 1: mod_base = um
  modified_base 2: mod_base = um
  modified_base 3: mod_base = cm
  modified_base 4: mod_base = cm
  modified_base 5: mod_base = um
  modified_base 6: mod_base = cm
  modified_base 7: mod_base = gm
  modified_base 8: mod_base = gm
  modified_base 9: mod_base = OTHER; note = 2'-fluorouridine
  modified_base 10: mod_base = OTHER; note = 2'-O-methyladenosine
  modified_base 11: mod_base = OTHER; note = 2'-fluorouridine
  modified_base 12: mod_base = OTHER; note = 2'-fluorouridine
  modified_base 13: mod_base = um
  modified_base 14: mod_base = OTHER; note = 2'-O-methyladenosine
  modified_base 15: mod_base = um
  modified_base 16: mod_base = um
  modified_base 17: mod_base = gm
  modified_base 18: mod_base = um
  modified_base 19: mod_base = cm
  modified_base 20: mod_base = um
  modified_base 21: mod_base = OTHER; note = 2'-O-methyladenosine
  source 1..21: mol_type = other RNA
ttcctcggtatttattgtcta

SEQ ID NO: 967 - RNA, 21 nt, synthetic construct
  modified_base 1: mod_base = cm
  modified_base 2: mod_base = cm
  modified_base 3: mod_base = um
  modified_base 4: mod_base = gm
  modified_base 5: mod_base = gm
  modified_base 6: mod_base = um
  modified_base 7: mod_base = cm
  modified_base 8: mod_base = OTHER; note = 2'-O-methyladenosine
  modified_base 9: mod_base = OTHER; note = 2'-fluorouridine
  modified_base 10: mod_base = gm
  modified_base 11: mod_base = OTHER; note = 2'-fluoroguanosine
  modified_base 12: mod_base = OTHER; note = 2'-fluoroadenosine
  modified_base 13: mod_base = gm
  modified_base 14: mod_base = um
  modified_base 15: mod_base = OTHER; note = 2'-O-methyladenosine
  modified_base 16: mod_base = um
  modified_base 17: mod_base = um
  modified_base 18: mod_base = OTHER; note = 2'-O-methyladenosine
  modified_base 19: mod_base = cm
  modified_base 20: mod_base = gm
  modified_base 21: mod_base = OTHER; note = 2'-O-methyladenosine
  source 1..21: mol_type = other RNA
cctggtcatggagtattacga

SEQ ID NO: 968 - RNA, 22 nt, synthetic construct
  modified_base 1: mod_base = um
  modified_base 2: mod_base = um
  modified_base 3: mod_base = cm
  modified_base 4: mod_base = cm
  modified_base 5: mod_base = um
  modified_base 6: mod_base = cm
  modified_base 7: mod_base = gm
  modified_base 8: mod_base = gm
  modified_base 9: mod_base = OTHER; note = 2'-fluorouridine
  modified_base 10: mod_base = OTHER; note = 2'-O-methyladenosine
  modified_base 11: mod_base = OTHER; note = 2'-fluorouridine
  modified_base 12: mod_base = OTHER; note = 2'-fluorouridine
  modified_base 13: mod_base = um
  modified_base 14: mod_base = OTHER; note = 2'-O-methyladenosine
  modified_base 15: mod_base = um
  modified_base 16: mod_base = um
  modified_base 17: mod_base = gm
  modified_base 18: mod_base = um
  modified_base 19: mod_base = cm
  modified_base 20: mod_base = um
  modified_base 21: mod_base = OTHER; note = 2'-O-propargyladenosine
  source 1..22: mol_type = other RNA
ttcctcggtatttattgtctaa

SEQ ID NO: 969 - RNA, 22 nt, synthetic construct
  modified_base 1: mod_base = um
  modified_base 2: mod_base = um
  modified_base 3: mod_base = cm
  modified_base 4: mod_base = cm
  modified_base 5: mod_base = um
  modified_base 6: mod_base = cm
  modified_base 7: mod_base = gm
  modified_base 8: mod_base = gm
  modified_base 9: mod_base = OTHER; note = 2'-fluorouridine
  modified_base 10: mod_base = OTHER; note = 2'-O-methyladenosine
  modified_base 11: mod_base = OTHER; note = 2'-fluorouridine
  modified_base 12: mod_base = OTHER; note = 2'-fluorouridine
  modified_base 13: mod_base = um
  modified_base 14: mod_base = OTHER; note = 2'-O-methyladenosine
  modified_base 15: mod_base = um
  modified_base 16: mod_base = um
  modified_base 17: mod_base = gm
  modified_base 18: mod_base = um
  modified_base 19: mod_base = cm
  modified_base 20: mod_base = um
  modified_base 20^21: mod_base = OTHER; note = phosphorothioate linkage
  modified_base 21: mod_base = OTHER; note = 2'-O-propargyladenosine
  source 1..22: mol_type = other RNA
ttcctcggtatttattgtctaa

SEQ ID NO: 970 - RNA, 21 nt, synthetic construct
  modified_base 1: mod_base = um
  modified_base 2: mod_base = um
  modified_base 3: mod_base = cm
  modified_base 4: mod_base = cm
  modified_base 5: mod_base = um
  modified_base 6: mod_base = cm
  modified_base 7: mod_base = gm
  modified_base 8: mod_base = gm
  modified_base 9: mod_base = OTHER; note = 2'-fluorouridine
  modified_base 10: mod_base = OTHER; note = 2'-O-methyladenosine
  modified_base 11: mod_base = OTHER; note = 2'-fluorouridine
  modified_base 12: mod_base = OTHER; note = 2'-fluorouridine
  modified_base 13: mod_base = um
  modified_base 14: mod_base = OTHER; note = 2'-O-methyladenosine
  modified_base 15: mod_base = um
  modified_base 16: mod_base = um
  modified_base 17: mod_base = gm
  modified_base 18: mod_base = um
  modified_base 19: mod_base = cm
  modified_base 20: mod_base = um
  modified_base 21: mod_base = OTHER; note = 2'-O-methyladenosine
  source 1..21: mol_type = other RNA
ttcctcggtatttattgtcta

SEQ ID NO: 971 - RNA, 21 nt, synthetic construct
  modified_base 1: mod_base = cm
  modified_base 2: mod_base = cm
  modified_base 3: mod_base = um
  modified_base 4: mod_base = gm
  modified_base 5: mod_base = gm
  modified_base 6: mod_base = um
  modified_base 7: mod_base = cm
  modified_base 8: mod_base = OTHER; note = 2'-O-methyladenosine
  modified_base 9: mod_base = OTHER; note = 2'-fluorouridine
  modified_base 10: mod_base = gm
  modified_base 11: mod_base = OTHER; note = 2'-fluoroguanosine
  modified_base 12: mod_base = OTHER; note = 2'-fluoroadenosine
  modified_base 13: mod_base = gm
  modified_base 14: mod_base = um
  modified_base 15: mod_base = OTHER; note = 2'-O-methyladenosine
  modified_base 16: mod_base = um
  modified_base 17: mod_base = um
  modified_base 18: mod_base = OTHER; note = 2'-O-methyladenosine
  modified_base 19: mod_base = cm
  modified_base 20: mod_base = gm
  modified_base 21: mod_base = OTHER; note = 2'-O-methyladenosine
  source 1..21: mol_type = other RNA
cctggtcatggagtattacga

SEQ ID NO: 972 - RNA, 22 nt, synthetic construct
  modified_base 1: mod_base = cm
  modified_base 2: mod_base = cm
  modified_base 3: mod_base = um
  modified_base 4: mod_base = gm
  modified_base 5: mod_base = gm
  modified_base 6: mod_base = gm
  modified_base 7: mod_base = um
  modified_base 8: mod_base = cm
  modified_base 9: mod_base = OTHER; note = 2'-O-methyladenosine
  modified_base 10: mod_base = OTHER; note = 2'-fluorouridine
  modified_base 11: mod_base = gm
  modified_base 12: mod_base = OTHER; note = 2'-fluoroguanosine
  modified_base 13: mod_base = OTHER; note = 2'-fluoroadenosine
  modified_base 14: mod_base = gm
  modified_base 15: mod_base = um
  modified_base 16: mod_base = OTHER; note = 2'-O-methyladenosine
  modified_base 17: mod_base = um
  modified_base 18: mod_base = um
  modified_base 19: mod_base = OTHER; note = 2'-O-methyladenosine
  modified_base 20: mod_base = cm
  modified_base 21: mod_base = gm
  modified_base 22: mod_base = OTHER; note = 2'-O-methyladenosine
  source 1..22: mol_type = other RNA
cctgggtcatggagtattacga

SEQ ID NO: 973 - RNA, 21 nt, synthetic construct
  modified_base 1: mod_base = cm
  modified_base 2: mod_base = cm
  modified_base 3: mod_base = um
  modified_base 4: mod_base = gm
  modified_base 5: mod_base = gm
  modified_base 6: mod_base = um
  modified_base 7: mod_base = cm
  modified_base 8: mod_base = OTHER; note = 2'-O-methyladenosine
  modified_base 9: mod_base = OTHER; note = 2'-fluorouridine
  modified_base 10: mod_base = gm
  modified_base 11: mod_base = OTHER; note = 2'-fluoroguanosine
  modified_base 12: mod_base = OTHER; note = 2'-fluoroadenosine
  modified_base 13: mod_base = gm
  modified_base 14: mod_base = um
  modified_base 15: mod_base = OTHER; note = 2'-O-methyladenosine
  modified_base 16: mod_base = um
  modified_base 17: mod_base = um
  modified_base 18: mod_base = OTHER; note = 2'-O-methyladenosine
  modified_base 19: mod_base = cm
  modified_base 20: mod_base = gm
  modified_base 21: mod_base = OTHER; note = 2'-O-methyladenosine
  source 1..21: mol_type = other RNA
cctggtcatggagtattacga

SEQ ID NO: 974 - RNA, 20 nt, synthetic construct
  modified_base 1: mod_base = cm
  modified_base 2: mod_base = um
  modified_base 3: mod_base = gm
  modified_base 4: mod_base = gm
  modified_base 5: mod_base = um
  modified_base 6: mod_base = cm
  modified_base 7: mod_base = OTHER; note = 2'-O-methyladenosine
  modified_base 8: mod_base = OTHER; note = 2'-fluorouridine
  modified_base 9: mod_base = gm
  modified_base 10: mod_base = OTHER; note = 2'-fluoroguanosine
  modified_base 11: mod_base = OTHER; note = 2'-fluoroadenosine
  modified_base 12: mod_base = gm
  modified_base 13: mod_base = um
  modified_base 14: mod_base = OTHER; note = 2'-O-methyladenosine
  modified_base 15: mod_base = um
  modified_base 16: mod_base = um
  modified_base 17: mod_base = OTHER; note = 2'-O-methyladenosine
  modified_base 18: mod_base = cm
  modified_base 19: mod_base = gm
  modified_base 20: mod_base = OTHER; note = 2'-O-methyladenosine
  source 1..20: mol_type = other RNA
ctggtcatggagtattacga

SEQ ID NO: 975 - RNA, 21 nt, synthetic construct
  modified_base 1: mod_base = cm
  modified_base 1^2: mod_base = OTHER; note = phosphorothioate linkage
  modified_base 2: mod_base = cm
  modified_base 3: mod_base = um
  modified_base 4: mod_base = gm
  modified_base 5: mod_base = gm
  modified_base 6: mod_base = um
  modified_base 7: mod_base = cm
  modified_base 8: mod_base = OTHER; note = 2'-O-methyladenosine
  modified_base 9: mod_base = OTHER; note = 2'-fluorouridine
  modified_base 10: mod_base = gm
  modified_base 11: mod_base = OTHER; note = 2'-fluoroguanosine
  modified_base 12: mod_base = OTHER; note = 2'-fluoroadenosine
  modified_base 13: mod_base = gm
  modified_base 14: mod_base = um
  modified_base 15: mod_base = OTHER; note = 2'-O-methyladenosine
  modified_base 16: mod_base = um
  modified_base 17: mod_base = um
  modified_base 18: mod_base = OTHER; note = 2'-O-methyladenosine
  modified_base 19: mod_base = cm
  modified_base 20: mod_base = gm
  modified_base 21: mod_base = OTHER; note = 2'-O-methyladenosine
  source 1..21: mol_type = other RNA
cctggtcatggagtattacga

SEQ ID NO: 976 - RNA, 21 nt, synthetic construct
  modified_base 1: mod_base = gm
  modified_base 2: mod_base = gm
  modified_base 3: mod_base = OTHER; note = 2'-O-methyladenosine
  modified_base 4: mod_base = um
  modified_base 5: mod_base = gm
  modified_base 6: mod_base = OTHER; note = 2'-O-methyladenosine
  modified_base 7: mod_base = OTHER; note = 2'-O-methyladenosine
  modified_base 8: mod_base = OTHER; note = 2'-O-methyladenosine
  modified_base 9: mod_base = OTHER; note = 2'-fluorocytidine
  modified_base 10: mod_base = OTHER; note = 2'-fluoroadenosine
  modified_base 11: mod_base = OTHER; note = 2'-fluoroguanosine
  modified_base 12: mod_base = cm
  modified_base 13: mod_base = um
  modified_base 14: mod_base = gm
  modified_base 15: mod_base = OTHER; note = 2'-O-methyladenosine
  modified_base 16: mod_base = OTHER; note = 2'-O-methyladenosine
  modified_base 17: mod_base = gm
  modified_base 18: mod_base = um
  modified_base 19: mod_base = OTHER; note = 2'-O-methylinosine
  modified_base 20: mod_base = gm
  modified_base 21: mod_base = OTHER; note = 2'-O-methyladenosine
  source 1..21: mol_type = other RNA
ggatgaaacagctgaagtnga

SEQ ID NO: 977 - RNA, 21 nt, synthetic construct
  modified_base 1: mod_base = um
  modified_base 2: mod_base = cm
  modified_base 3: mod_base = cm
  modified_base 4: mod_base = cm
  modified_base 5: mod_base = um
  modified_base 6: mod_base = gm
  modified_base 7: mod_base = OTHER; note = 2'-O-methyladenosine
  modified_base 8: mod_base = OTHER; note = 2'-O-methyladenosine
  modified_base 9: mod_base = OTHER; note = 2'-fluorocytidine
  modified_base 10: mod_base = OTHER; note = 2'-fluorocytidine
  modified_base 11: mod_base = OTHER; note = 2'-fluorocytidine
  modified_base 12: mod_base = um
  modified_base 13: mod_base = OTHER; note = 2'-O-methyladenosine
  modified_base 14: mod_base = gm
  modified_base 15: mod_base = OTHER; note = 2'-O-methyladenosine
  modified_base 16: mod_base = OTHER; note = 2'-O-methyladenosine
  modified_base 17: mod_base = cm
  modified_base 18: mod_base = um
  modified_base 19: mod_base = gm
  modified_base 20: mod_base = um
  modified_base 21: mod_base = OTHER; note = 2'-O-methyladenosine
  source 1..21: mol_type = other RNA
tccctgaaccctagaactgta

SEQ ID NO: 978 - RNA, 21 nt, synthetic construct
  modified_base 1: mod_base = gm
  modified_base 2: mod_base = OTHER; note = 2'-O-methyladenosine
  modified_base 3: mod_base = OTHER; note = 2'-O-methyladenosine
  modified_base 4: mod_base = cm
  modified_base 5: mod_base = cm
  modified_base 6: mod_base = cm
  modified_base 7: mod_base = um
  modified_base 8: mod_base = OTHER; note = 2'-O-methyladenosine
  modified_base 9: mod_base = OTHER; note = 2'-fluoroguanosine
  modified_base 10: mod_base = OTHER; note = 2'-fluoroadenosine
  modified_base 11: mod_base = OTHER; note = 2'-fluoroadenosine
  modified_base 12: mod_base = cm
  modified_base 13: mod_base = um
  modified_base 14: mod_base = gm
  modified_base 15: mod_base = um
  modified_base 16: mod_base = cm
  modified_base 17: mod_base = um
  modified_base 18: mod_base = um
  modified_base 19: mod_base = cm
  modified_base 20: mod_base = OTHER; note = 2'-O-methylinosine
  modified_base 21: mod_base = OTHER; note = 2'-O-methyladenosine
  source 1..21: mol_type = other RNA
gaaccctagaactgtcttcna

SEQ ID NO: 979 - RNA, 21 nt, synthetic construct
  modified_base 1: mod_base = gm
  modified_base 2: mod_base = OTHER; note = 2'-O-methyladenosine
  modified_base 3: mod_base = cm
  modified_base 4: mod_base = cm
  modified_base 5: mod_base = cm
  modified_base 6: mod_base = um
  modified_base 7: mod_base = OTHER; note = 2'-O-methyladenosine
  modified_base 8: mod_base = gm
  modified_base 9: mod_base = OTHER; note = 2'-fluoroadenosine
  modified_base 10: mod_base = OTHER; note = 2'-fluoroadenosine
  modified_base 11: mod_base = OTHER; note = 2'-fluorocytidine
  modified_base 12: mod_base = um
  modified_base 13: mod_base = gm
  modified_base 14: mod_base = um
  modified_base 15: mod_base = cm
  modified_base 16: mod_base = um
  modified_base 17: mod_base = um
  modified_base 18: mod_base = cm
  modified_base 19: mod_base = OTHER; note = 2'-O-methylinosine
  modified_base 20: mod_base = OTHER; note = 2'-O-methyladenosine
  modified_base 21: mod_base = OTHER; note = 2'-O-methyladenosine
  source 1..21: mol_type = other RNA
gaccctagaactgtcttcnaa

SEQ ID NO: 980 - RNA, 21 nt, synthetic construct
  modified_base 1: mod_base = OTHER; note = 2'-O-methyladenosine
  modified_base 2: mod_base = cm
  modified_base 3: mod_base = cm
  modified_base 4: mod_base = cm
  modified_base 5: mod_base = um
  modified_base 6: mod_base = OTHER; note = 2'-O-methyladenosine
  modified_base 7: mod_base = gm
  modified_base 8: mod_base = OTHER; note = 2'-O-methyladenosine
  modified_base 9: mod_base = OTHER; note = 2'-fluoroadenosine
  modified_base 10: mod_base = OTHER; note = 2'-fluorocytidine
  modified_base 11: mod_base = OTHER; note = 2'-fluorouridine
  modified_base 12: mod_base = gm
  modified_base 13: mod_base = um
  modified_base 14: mod_base = cm
  modified_base 15: mod_base = um
  modified_base 16: mod_base = um
  modified_base 17: mod_base = cm
  modified_base 18: mod_base = OTHER; note = 2'-O-methylinosine
  modified_base 19: mod_base = OTHER; note = 2'-O-methyladenosine
  modified_base 20: mod_base = cm
  modified_base 21: mod_base = um
  source 1..21: mol_type = other RNA
accctagaactgtcttcnact

SEQ ID NO: 981 - RNA, 21 nt, synthetic construct
  modified_base 1: mod_base = cm
  modified_base 2: mod_base = cm
  modified_base 3: mod_base = cm
  modified_base 4: mod_base = um
  modified_base 5: mod_base = OTHER; note = 2'-O-methyladenosine
  modified_base 6: mod_base = gm
  modified_base 7: mod_base = OTHER; note = 2'-O-methyladenosine
  modified_base 8: mod_base = OTHER; note = 2'-O-methyladenosine
  modified_base 9: mod_base = OTHER; note = 2'-fluorocytidine
  modified_base 10: mod_base = OTHER; note = 2'-fluorouridine
  modified_base 11: mod_base = OTHER; note = 2'-fluoroguanosine
  modified_base 12: mod_base = um
  modified_base 13: mod_base = cm
  modified_base 14: mod_base = um
  modified_base 15: mod_base = um
  modified_base 16: mod_base = cm
  modified_base 17: mod_base = OTHER; note = 2'-O-methylinosine
  modified_base 18: mod_base = OTHER; note = 2'-O-methyladenosine
  modified_base 19: mod_base = cm
  modified_base 20: mod_base = um
  modified_base 21: mod_base = OTHER; note = 2'-O-methyladenosine
  source 1..21: mol_type = other RNA
ccctagaactgtcttcnacta

SEQ ID NO: 982 - RNA, 21 nt, synthetic construct
  modified_base 1: mod_base = um
  modified_base 2: mod_base = gm
  modified_base 3: mod_base = cm
  modified_base 4: mod_base = um
  modified_base 5: mod_base = um
  modified_base 6: mod_base = OTHER; note = 2'-O-methyladenosine
  modified_base 7: mod_base = cm
  modified_base 8: mod_base = um
  modified_base 9: mod_base = OTHER; note = 2'-fluorocytidine
  modified_base 10: mod_base = OTHER; note = 2'-fluoroguanosine
  modified_base 11: mod_base = OTHER; note = 2'-fluoroguanosine
  modified_base 12: mod_base = gm
  modified_base 13: mod_base = OTHER; note = 2'-O-methyladenosine
  modified_base 14: mod_base = OTHER; note = 2'-O-methyladenosine
  modified_base 15: mod_base = OTHER; note = 2'-O-methyladenosine
  modified_base 16: mod_base = um
  modified_base 17: mod_base = um
  modified_base 18: mod_base = um
  modified_base 19: mod_base = gm
  modified_base 20: mod_base = cm
  modified_base 21: mod_base = um
  source 1..21: mol_type = other RNA
tgcttactcgggaaatttgct

SEQ ID NO: 983 - RNA, 21 nt, synthetic construct
  modified_base 1: mod_base = cm
  modified_base 2: mod_base = gm
  modified_base 3: mod_base = gm
  modified_base 4: mod_base = gm
  modified_base 5: mod_base = OTHER; note = 2'-O-methyladenosine
  modified_base 6: mod_base = OTHER; note = 2'-O-methyladenosine
  modified_base 7: mod_base = OTHER; note = 2'-O-methyladenosine
  modified_base 8: mod_base = um
  modified_base 9: mod_base = OTHER; note = 2'-fluorouridine
  modified_base 10: mod_base = OTHER; note = 2'-fluorouridine
  modified_base 11: mod_base = OTHER; note = 2'-fluoroguanosine
  modified_base 12: mod_base = cm
  modified_base 13: mod_base = um
  modified_base 14: mod_base = um
  modified_base 15: mod_base = um
  modified_base 16: mod_base = um
  modified_base 17: mod_base = OTHER; note = 2'-O-methylinosine
  modified_base 18: mod_base = cm
  modified_base 19: mod_base = cm
  modified_base 20: mod_base = OTHER; note = 2'-O-methyladenosine
  modified_base 21: mod_base = OTHER; note = 2'-O-methyladenosine
  source 1..21: mol_type = other RNA
cgggaaatttgcttttnccaa

SEQ ID NO: 984 - RNA, 21 nt, synthetic construct
  modified_base 1: mod_base = OTHER; note = 2'-O-methyladenosine
  modified_base 2: mod_base = cm
  modified_base 3: mod_base = cm
  modified_base 4: mod_base = cm
  modified_base 5: mod_base = cm
  modified_base 6: mod_base = OTHER; note = 2'-O-methyladenosine
  modified_base 7: mod_base = OTHER; note = 2'-O-methyladenosine
  modified_base 8: mod_base = um
  modified_base 9: mod_base = OTHER; note = 2'-fluorocytidine
  modified_base 10: mod_base = OTHER; note = 2'-fluorocytidine
  modified_base 11: mod_base = OTHER; note = 2'-fluoroadenosine
  modified_base 12: mod_base = cm
  modified_base 13: mod_base = gm
  modified_base 14: mod_base = um
  modified_base 15: mod_base = um
  modified_base 16: mod_base = um
  modified_base 17: mod_base = um
  modified_base 18: mod_base = gm
  modified_base 19: mod_base = gm
  modified_base 20: mod_base = OTHER; note = 2'-O-methyladenosine
  modified_base 21: mod_base = um
  source 1..21: mol_type = other RNA
accccaatccacgttttggat

SEQ ID NO: 985 - RNA, 21 nt, synthetic construct
  modified_base 1: mod_base = cm
  modified_base 2: mod_base = cm
  modified_base 3: mod_base = cm
  modified_base 4: mod_base = OTHER; note = 2'-O-methyladenosine
  modified_base 5: mod_base = OTHER; note = 2'-O-methyladenosine
  modified_base 6: mod_base = um
  modified_base 7: mod_base = cm
  modified_base 8: mod_base = cm
  modified_base 9: mod_base = OTHER; note = 2'-fluoroadenosine
  modified_base 10: mod_base = OTHER; note = 2'-fluorocytidine
  modified_base 11: mod_base = OTHER; note = 2'-fluoroguanosine
  modified_base 12: mod_base = um
  modified_base 13: mod_base = um
  modified_base 14: mod_base = um
  modified_base 15: mod_base = um
  modified_base 16: mod_base = gm
  modified_base 17: mod_base = OTHER; note = 2'-O-methylinosine
  modified_base 18: mod_base = OTHER; note = 2'-O-methyladenosine
  modified_base 19: mod_base = um
  modified_base 20: mod_base = gm
  modified_base 21: mod_base = OTHER; note = 2'-O-methyladenosine
  source 1..21: mol_type = other RNA
cccaatccacgttttgnatga

SEQ ID NO: 986 - RNA, 21 nt, synthetic construct
  modified_base 1: mod_base = gm
  modified_base 2: mod_base = OTHER; note = 2'-O-methyladenosine
  modified_base 3: mod_base = gm
  modified_base 4: mod_base = gm
  modified_base 5: mod_base = gm
  modified_base 6: mod_base = OTHER; note = 2'-O-methyladenosine
  modified_base 7: mod_base = cm
  modified_base 8: mod_base = gm
  modified_base 9: mod_base = OTHER; note = 2'-fluorouridine
  modified_base 10: mod_base = OTHER; note = 2'-fluoroguanosine
  modified_base 11: mod_base = OTHER; note = 2'-fluorouridine
  modified_base 12: mod_base = um
  modified_base 13: mod_base = gm
  modified_base 14: mod_base = gm
  modified_base 15: mod_base = um
  modified_base 16: mod_base = OTHER; note = 2'-O-methylinosine
  modified_base 17: mod_base = OTHER; note = 2'-O-methyladenosine
  modified_base 18: mod_base = OTHER; note = 2'-O-methyladenosine
  modified_base 19: mod_base = um
  modified_base 20: mod_base = gm
  modified_base 21: mod_base = OTHER; note = 2'-O-methyladenosine
  source 1..21: mol_type = other RNA
gagggacgtgttggtnaatga

SEQ ID NO: 987 - RNA, 21 nt, synthetic construct
  modified_base 1: mod_base = gm
  modified_base 2: mod_base = gm
  modified_base 3: mod_base = OTHER; note = 2'-O-methyladenosine
  modified_base 4: mod_base = um
  modified_base 5: mod_base = gm
  modified_base 6: mod_base = OTHER; note = 2'-O-methyladenosine
  modified_base 7: mod_base = gm
  modified_base 8: mod_base = OTHER; note = 2'-O-methyladenosine
  modified_base 9: mod_base = OTHER; note = 2'-fluoroadenosine
  modified_base 10: mod_base = OTHER; note = 2'-fluorocytidine
  modified_base 11: mod_base = OTHER; note = 2'-fluorouridine
  modified_base 12: mod_base = OTHER; note = 2'-O-methyladenosine
  modified_base 13: mod_base = cm
  modified_base 14: mod_base = cm
  modified_base 15: mod_base = um
  modified_base 16: mod_base = OTHER; note = 2'-O-methylinosine
  modified_base 17: mod_base = um
  modified_base 18: mod_base = OTHER; note = 2'-O-methyladenosine
  modified_base 19: mod_base = cm
  modified_base 20: mod_base = cm
  modified_base 21: mod_base = um
  source 1..21: mol_type = other RNA
ggatgagaactacctntacct

SEQ ID NO: 988 - RNA, 21 nt, synthetic construct
  modified_base 1: mod_base = cm
  modified_base 2: mod_base = cm
  modified_base 3: mod_base = um
  modified_base 4: mod_base = gm
  modified_base 5: mod_base = gm
  modified_base 6: mod_base = um
  modified_base 7: mod_base = cm
  modified_base 8: mod_base = OTHER; note = 2'-O-methyladenosine
  modified_base 9: mod_base = OTHER; note = 2'-fluorouridine
  modified_base 10: mod_base = OTHER; note = 2'-fluoroguanosine
  modified_base 11: mod_base = OTHER; note = 2'-fluoroguanosine
  modified_base 12: mod_base = OTHER; note = 2'-O-methyladenosine
  modified_base 13: mod_base = gm
  modified_base 14: mod_base = um
  modified_base 15: mod_base = OTHER; note = 2'-O-methyladenosine
  modified_base 16: mod_base = um
  modified_base 17: mod_base = um
  modified_base 18: mod_base = OTHER; note = 2'-O-methyladenosine
  modified_base 19: mod_base = cm
  modified_base 20: mod_base = gm
  modified_base 21: mod_base = um
  source 1..21: mol_type = other RNA
cctggtcatggagtattacgt

SEQ ID NO: 989 - RNA, 21 nt, synthetic construct
  modified_base 1: mod_base = gm
  modified_base 2: mod_base = gm
  modified_base 3: mod_base = OTHER; note = 2'-O-methyladenosine
  modified_base 4: mod_base = cm
  modified_base 5: mod_base = OTHER; note = 2'-O-methyladenosine
  modified_base 6: mod_base = um
  modified_base 7: mod_base = cm
  modified_base 8: mod_base = OTHER; note = 2'-O-methyladenosine
  modified_base 9: mod_base = OTHER; note = 2'-fluoroadenosine
  modified_base 10: mod_base = OTHER; note = 2'-fluoroadenosine
  modified_base 11: mod_base = OTHER; note = 2'-fluorocytidine
  modified_base 12: mod_base = cm
  modified_base 13: mod_base = cm
  modified_base 14: mod_base = gm
  modified_base 15: mod_base = OTHER; note = 2'-O-methyladenosine
  modified_base 16: mod_base = cm
  modified_base 17: mod_base = OTHER; note = 2'-O-methyladenosine
  modified_base 18: mod_base = OTHER; note = 2'-O-methyladenosine
  modified_base 19: mod_base = cm
  modified_base 20: mod_base = OTHER; note = 2'-O-methyladenosine
  modified_base 21: mod_base = um
  source 1..21: mol_type = other RNA
ggacatcaaacccgacaacat

SEQ ID NO: 990 - RNA, 21 nt, synthetic construct
  modified_base 1: mod_base = um
  modified_base 2: mod_base = gm
  modified_base 3: mod_base = gm
  modified_base 4: mod_base = cm
  modified_base 5: mod_base = OTHER; note = 2'-O-methyladenosine
  modified_base 6: mod_base = OTHER; note = 2'-O-methyladenosine
  modified_base 7: mod_base = gm
  modified_base 8: mod_base = OTHER; note = 2'-O-methyladenosine
  modified_base 9: mod_base = OTHER; note = 2'-fluorouridine
  modified_base 10: mod_base = OTHER; note = 2'-fluorocytidine
  modified_base 11: mod_base = OTHER; note = 2'-fluoroguanosine
  modified_base 12: mod_base = um
  modified_base 13: mod_base = cm
  modified_base 14: mod_base = cm
  modified_base 15: mod_base = OTHER; note = 2'-O-methyladenosine
  modified_base 16: mod_base = cm
  modified_base 17: mod_base = um
  modified_base 18: mod_base = OTHER; note = 2'-O-methyladenosine
  modified_base 19: mod_base = cm
  modified_base 20: mod_base = OTHER; note = 2'-O-methyladenosine
  modified_base 21: mod_base = OTHER; note = 2'-O-methyladenosine
  source 1..21: mol_type = other RNA
tggcaagatcgtccactacaa

SEQ ID NO: 991 - RNA, 21 nt, synthetic construct
  modified_base 1: mod_base = cm
  modified_base 2: mod_base = cm
  modified_base 3: mod_base = cm
  modified_base 4: mod_base = cm
  modified_base 5: mod_base = um
  modified_base 6: mod_base = um
  modified_base 7: mod_base = um
  modified_base 8: mod_base = OTHER; note = 2'-O-methyladenosine
  modified_base 9: mod_base = OTHER; note = 2'-fluorocytidine
  modified_base 10: mod_base = OTHER; note = 2'-fluoroadenosine
  modified_base 11: mod_base = OTHER; note = 2'-fluorocytidine
  modified_base 12: mod_base = cm
  modified_base 13: mod_base = gm
  modified_base 14: mod_base = gm
  modified_base 15: mod_base = OTHER; note = 2'-O-methyladenosine
  modified_base 16: mod_base = um
  modified_base 17: mod_base = um
  modified_base 18: mod_base = um
  modified_base 19: mod_base = cm
  modified_base 20: mod_base = gm
  modified_base 21: mod_base = OTHER; note = 2'-O-methyladenosine
  source 1..21: mol_type = other RNA
cccctttacaccggatttcga

SEQ ID NO: 992 - RNA, 21 nt, synthetic construct
  modified_base 1: mod_base = cm
  modified_base 2: mod_base = gm
  modified_base 3: mod_base = OTHER; note = 2'-O-methyladenosine
  modified_base 4: mod_base = cm
  modified_base 5: mod_base = OTHER; note = 2'-O-methyladenosine
  modified_base 6: mod_base = cm
  modified_base 7: mod_base = OTHER; note = 2'-O-methyladenosine
  modified_base 8: mod_base = um
  modified_base 9: mod_base = OTHER; note = 2'-fluoroguanosine
  modified_base 10: mod_base = OTHER; note = 2'-fluorocytidine
  modified_base 11: mod_base = OTHER; note = 2'-fluoroadenosine
  modified_base 12: mod_base = OTHER; note = 2'-O-methyladenosine
  modified_base 13: mod_base = cm
  modified_base 14: mod_base = um
  modified_base 15: mod_base = um
  modified_base 16: mod_base = cm
  modified_base 17: mod_base = OTHER; note = 2'-O-methylinosine
  modified_base 18: mod_base = OTHER; note = 2'-O-methyladenosine
  modified_base 19: mod_base = cm
  modified_base 20: mod_base = um
  modified_base 21: mod_base = um
  source 1..21: mol_type = other RNA
cgacacatgcaacttcnactt

SEQ ID NO: 993 - RNA, 21 nt, synthetic construct
  modified_base 1: mod_base = gm
  modified_base 2: mod_base = gm
  modified_base 3: mod_base = OTHER; note = 2'-O-methyladenosine
  modified_base 4: mod_base = OTHER; note = 2'-O-methyladenosine
  modified_base 5: mod_base = cm
  modified_base 6: mod_base = cm
  modified_base 7: mod_base = cm
  modified_base 8: mod_base = um
  modified_base 9: mod_base = OTHER; note = 2'-fluoroadenosine
  modified_base 10: mod_base = OTHER; note = 2'-fluoroguanosine
  modified_base 11: mod_base = OTHER; note = 2'-fluoroadenosine
  modified_base 12: mod_base = OTHER; note = 2'-O-methyladenosine
  modified_base 13: mod_base = cm
  modified_base 14: mod_base = um
  modified_base 15: mod_base = gm
  modified_base 16: mod_base = um
  modified_base 17: mod_base = cm
  modified_base 18: mod_base = um
  modified_base 19: mod_base = um
  modified_base 20: mod_base = cm
  modified_base 21: mod_base = OTHER; note = 2'-O-methyladenosine
  source 1..21: mol_type = other RNA
ggaaccctagaactgtcttca

SEQ ID NO: 994 - RNA, 21 nt, synthetic construct
  modified_base 1: mod_base = gm
  modified_base 2: mod_base = gm
  modified_base 3: mod_base = OTHER; note = 2'-O-methyladenosine
  modified_base 4: mod_base = OTHER; note = 2'-O-methyladenosine
  modified_base 5: mod_base = cm
  modified_base 6: mod_base = cm
  modified_base 7: mod_base = cm
  modified_base 8: mod_base = um
  modified_base 9: mod_base = OTHER; note = 2'-fluoroadenosine
  modified_base 10: mod_base = OTHER; note = 2'-fluoroguanosine
  modified_base 11: mod_base = OTHER; note = 2'-fluoroadenosine
  modified_base 12: mod_base = OTHER; note = 2'-O-methyladenosine
  modified_base 13: mod_base = cm
  modified_base 14: mod_base = um
  modified_base 15: mod_base = gm
  modified_base 16: mod_base = um
  modified_base 17: mod_base = um
  modified_base 18: mod_base = um
  modified_base 19: mod_base = um
  modified_base 20: mod_base = cm
  modified_base 21: mod_base = OTHER; note = 2'-O-methyladenosine
  source 1..21: mol_type = other RNA
ggaaccctagaactgttttca

SEQ ID NO: 995 - RNA, 21 nt, synthetic construct
  modified_base 1: mod_base = cm
  modified_base 2: mod_base = um
  modified_base 3: mod_base = gm
  modified_base 4: mod_base = cm
  modified_base 5: mod_base = um
  modified_base 6: mod_base = um
  modified_base 7: mod_base = OTHER; note = 2'-O-methyladenosine
  modified_base 8: mod_base = cm
  modified_base 9: mod_base = OTHER; note = 2'-fluorouridine
  modified_base 10: mod_base = OTHER; note = 2'-fluorocytidine
  modified_base 11: mod_base = OTHER; note = 2'-fluoroguanosine
  modified_base 12: mod_base = gm
  modified_base 13: mod_base = gm
  modified_base 14: mod_base = OTHER; note = 2'-O-methyladenosine
  modified_base 15: mod_base = OTHER; note = 2'-O-methyladenosine
  modified_base 16: mod_base = OTHER; note = 2'-O-methyladenosine
  modified_base 17: mod_base = um
  modified_base 18: mod_base = um
  modified_base 19: mod_base = um
  modified_base 20: mod_base = gm
  modified_base 21: mod_base = OTHER; note = 2'-O-methyladenosine
  source 1..21: mol_type = other RNA
ctgcttactcgggaaatttga

SEQ ID NO: 996 - RNA, 21 nt, synthetic construct
  modified_base 1: mod_base = gm
  modified_base 2: mod_base = cm
  modified_base 3: mod_base = gm
  modified_base 4: mod_base = gm
  modified_base 5: mod_base = um
  modified_base 6: mod_base = um
  modified_base 7: mod_base = um
  modified_base 8: mod_base = gm
  modified_base 9: mod_base = OTHER; note = 2'-fluoroguanosine
  modified_base 10: mod_base = OTHER; note = 2'-O-methyl-2-aminoadenosine
  modified_base 11: mod_base = OTHER; note = 2'-fluorouridine
  modified_base 12: mod_base = OTHER; note = 2'-O-methyladenosine
  modified_base 13: mod_base = OTHER; note = 2'-fluorouridine
  modified_base 14: mod_base = um
  modified_base 15: mod_base = um
  modified_base 16: mod_base = OTHER; note = 2'-O-methyladenosine
  modified_base 17: mod_base = um
  modified_base 18: mod_base = um
  modified_base 19: mod_base = gm
  modified_base 20: mod_base = OTHER; note = 2'-O-methyladenosine
  modified_base 21: mod_base = OTHER; note = 2'-O-methyladenosine
  source 1..21: mol_type = other RNA
gcggtttggntatttattgaa

SEQ ID NO: 997 - RNA, 21 nt, synthetic construct
  modified_base 1: mod_base = gm
  modified_base 2: mod_base = cm
  modified_base 3: mod_base = OTHER; note = 2'-O-methyladenosine
  modified_base 4: mod_base = um
  modified_base 5: mod_base = um
  modified_base 6: mod_base = cm
  modified_base 7: mod_base = cm
  modified_base 8: mod_base = um
  modified_base 9: mod_base = OTHER; note = 2'-fluorocytidine
  modified_base 10: mod_base = OTHER; note = 2'-fluoroguanosine
  modified_base 11: mod_base = OTHER; note = 2'-fluoroguanosine
  modified_base 12: mod_base = um
  modified_base 13: mod_base = OTHER; note = 2'-O-methyladenosine
  modified_base 14: mod_base = um
  modified_base 15: mod_base = um
  modified_base 16: mod_base = um
  modified_base 17: mod_base = OTHER; note = 2'-O-methyladenosine
  modified_base 18: mod_base = um
  modified_base 19: mod_base = um
  modified_base 20: mod_base = gm
  modified_base 21: mod_base = um
  source 1..21: mol_type = other RNA
gcattcctcggtatttattgt

SEQ ID NO: 998 - RNA, 21 nt, synthetic construct
  modified_base 1: mod_base = gm
  modified_base 2: mod_base = cm
  modified_base 3: mod_base = OTHER; note = 2'-O-methyladenosine
  modified_base 4: mod_base = um
  modified_base 5: mod_base = um
  modified_base 6: mod_base = cm
  modified_base 7: mod_base = cm
  modified_base 8: mod_base = um
  modified_base 9: mod_base = OTHER; note = 2'-fluorocytidine
  modified_base 10: mod_base = OTHER; note = 2'-fluoroguanosine
  modified_base 11: mod_base = OTHER; note = 2'-fluoroguanosine
  modified_base 12: mod_base = um
  modified_base 13: mod_base = OTHER; note = 2'-O-methyladenosine
  modified_base 14: mod_base = um
  modified_base 15: mod_base = um
  modified_base 16: mod_base = um
  modified_base 17: mod_base = OTHER; note = 2'-O-methyl-2-aminoadenosine
  modified_base 18: mod_base = um
  modified_base 19: mod_base = um
  modified_base 20: mod_base = gm
  modified_base 21: mod_base = um
  source 1..21: mol_type = other RNA
gcattcctcggtatttnttgt

SEQ ID NO: 999 - RNA, 21 nt, synthetic construct
  modified_base 1: mod_base = gm
  modified_base 2: mod_base = OTHER; note = 2'-O-methyladenosine
  modified_base 3: mod_base = cm
  modified_base 4: mod_base = cm
  modified_base 5: mod_base = cm
  modified_base 6: mod_base = um
  modified_base 7: mod_base = cm
  modified_base 8: mod_base = gm
  modified_base 9: mod_base = OTHER; note = 2'-fluorocytidine
  modified_base 10: mod_base = OTHER; note = 2'-fluoroguanosine
  modified_base 11: mod_base = OTHER; note = 2'-fluoroadenosine
  modified_base 12: mod_base = OTHER; note = 2'-O-methyladenosine
  modified_base 13: mod_base = um
  modified_base 14: mod_base = OTHER; note = 2'-O-methyladenosine
  modified_base 15: mod_base = OTHER; note = 2'-O-methyladenosine
  modified_base 16: mod_base = OTHER; note = 2'-O-methyladenosine
  modified_base 17: mod_base = OTHER; note = 2'-O-methyladenosine
  modified_base 18: mod_base = gm
  modified_base 19: mod_base = OTHER; note = 2'-O-methylinosine
  modified_base 20: mod_base = cm
  modified_base 21: mod_base = OTHER; note = 2'-O-methyladenosine
  source 1..21: mol_type = other RNA
gaccctcgcgaataaaagnca

SEQ ID NO: 1000 - RNA, 21 nt, synthetic construct
  modified_base 1: mod_base = OTHER; note = 2'-O-methyladenosine
  modified_base 2: mod_base = gm
  modified_base 3: mod_base = gm
  modified_base 4: mod_base = gm
  modified_base 5: mod_base = gm
  modified_base 6: mod_base = cm
  modified_base 7: mod_base = gm
  modified_base 8: mod_base = OTHER; note = 2'-O-methyladenosine
  modified_base 9: mod_base = OTHER; note = 2'-fluoroguanosine
  modified_base 10: mod_base = OTHER; note = 2'-fluoroguanosine
  modified_base 11: mod_base = OTHER; note = 2'-fluorouridine
  modified_base 12: mod_base = gm
  modified_base 13: mod_base = um
  modified_base 14: mod_base = cm
  modified_base 15: mod_base = gm
  modified_base 16: mod_base = um
  modified_base 17: mod_base = gm
  modified_base 18: mod_base = cm
  modified_base 19: mod_base = um
  modified_base 20: mod_base = um
  modified_base 21: mod_base = OTHER; note = 2'-O-methyladenosine
  source 1..21: mol_type = other RNA
aggggcgaggtgtcgtgctta

SEQ ID NO: 1001 - RNA, 21 nt, synthetic construct
  modified_base 1: mod_base = gm
  modified_base 2: mod_base = gm
  modified_base 3: mod_base = cm
  modified_base 4: mod_base = OTHER; note = 2'-O-methyladenosine
  modified_base 5: mod_base = gm
  modified_base 6: mod_base = OTHER; note = 2'-O-methyladenosine
  modified_base 7: mod_base = cm
  modified_base 8: mod_base = gm
  modified_base 9: mod_base = OTHER; note = 2'-fluorocytidine
  modified_base 10: mod_base = OTHER; note = 2'-fluorocytidine
  modified_base 11: mod_base = OTHER; note = 2'-fluorocytidine
  modified_base 12: mod_base = um
  modified_base 13: mod_base = um
  modified_base 14: mod_base = cm
  modified_base 15: mod_base = um
  modified_base 16: mod_base = OTHER; note = 2'-O-methyladenosine
  modified_base 17: mod_base = cm
  modified_base 18: mod_base = gm
  modified_base 19: mod_base = cm
  modified_base 20: mod_base = gm
  modified_base 21: mod_base = OTHER; note = 2'-O-methyladenosine
  source 1..21: mol_type = other RNA
ggcagacgcccttctacgcga

SEQ ID NO: 1002 - RNA, 21 nt, synthetic construct
  modified_base 1: mod_base = gm
  modified_base 2: mod_base = gm
  modified_base 3: mod_base = cm
  modified_base 4: mod_base = OTHER; note = 2'-O-methyladenosine
  modified_base 5: mod_base = gm
  modified_base 6: mod_base = OTHER; note = 2'-O-methyladenosine
  modified_base 7: mod_base = cm
  modified_base 8: mod_base = cm
  modified_base 9: mod_base = OTHER; note = 2'-fluorocytidine
  modified_base 10: mod_base = OTHER; note = 2'-fluorocytidine
  modified_base 11: mod_base = OTHER; note = 2'-fluorocytidine
  modified_base 12: mod_base = um
  modified_base 13: mod_base = um
  modified_base 14: mod_base = cm
  modified_base 15: mod_base = um
  modified_base 16: mod_base = OTHER; note = 2'-O-methyladenosine
  modified_base 17: mod_base = cm
  modified_base 18: mod_base = gm
  modified_base 19: mod_base = cm
  modified_base 20: mod_base = gm
  modified_base 21: mod_base = OTHER; note = 2'-O-methyladenosine
  source 1..21: mol_type = other RNA
ggcagacccccttctacgcga

SEQ ID NO: 1003 - RNA, 21 nt, synthetic construct
  modified_base 1: mod_base = cm
  modified_base 2: mod_base = cm
  modified_base 3: mod_base = cm
  modified_base 4: mod_base = cm
  modified_base 5: mod_base = gm
  modified_base 6: mod_base = OTHER; note = 2'-O-methyladenosine
  modified_base 7: mod_base = cm
  modified_base 8: mod_base = OTHER; note = 2'-O-methyladenosine
  modified_base 9: mod_base = OTHER; note = 2'-fluorouridine
  modified_base 10: mod_base = OTHER; note = 2'-fluorouridine
  modified_base 11: mod_base = OTHER; note = 2'-fluorocytidine
  modified_base 12: mod_base = cm
  modified_base 13: mod_base = um
  modified_base 14: mod_base = cm
  modified_base 15: mod_base = gm
  modified_base 16: mod_base = gm
  modified_base 17: mod_base = um
  modified_base 18: mod_base = OTHER; note = 2'-O-methyladenosine
  modified_base 19: mod_base = um
  modified_base 20: mod_base = um
  modified_base 21: mod_base = OTHER; note = 2'-O-methyladenosine
  source 1..21: mol_type = other RNA
ccccgacattcctcggtatta

SEQ ID NO: 1004 - RNA, 21 nt, synthetic construct
  modified_base 1: mod_base = um
  modified_base 2: mod_base = um
  modified_base 3: mod_base = cm
  modified_base 4: mod_base = cm
  modified_base 5: mod_base = um
  modified_base 6: mod_base = cm
  modified_base 7: mod_base = gm
  modified_base 8: mod_base = gm
  modified_base 9: mod_base = OTHER; note = 2'-fluorouridine
  modified_base 10: mod_base = OTHER; note = 2'-fluoroadenosine
  modified_base 11: mod_base = OTHER; note = 2'-fluorouridine
  modified_base 12: mod_base = um
  modified_base 13: mod_base = um
  modified_base 14: mod_base = OTHER; note = 2'-O-methyladenosine
  modified_base 15: mod_base = um
  modified_base 16: mod_base = um
  modified_base 17: mod_base = gm
  modified_base 18: mod_base = um
  modified_base 19: mod_base = cm
  modified_base 20: mod_base = um
  modified_base 21: mod_base = OTHER; note = 2'-O-methyladenosine
  source 1..21: mol_type = other RNA
ttcctcggtatttattgtcta

SEQ ID NO: 1005 - RNA, 19 nt, synthetic construct
  modified_base 1: mod_base = gm
  modified_base 2: mod_base = cm
  modified_base 3: mod_base = gm
  modified_base 4: mod_base = OTHER; note = 2'-O-methyladenosine
  modified_base 5: mod_base = gm
  modified_base 6: mod_base = gm
  modified_base 7: mod_base = OTHER; note = 2'-fluorouridine
  modified_base 8: mod_base = OTHER; note = 2'-fluoroadenosine
  modified_base 9: mod_base = OTHER; note = 2'-fluoroguanosine
  modified_base 10: mod_base = cm
  modified_base 11: mod_base = gm
  modified_base 12: mod_base = gm
  modified_base 13: mod_base = um
  modified_base 14: mod_base = OTHER; note = 2'-O-methyladenosine
  modified_base 15: mod_base = gm
  modified_base 16: mod_base = um
  modified_base 17: mod_base = gm
  modified_base 18: mod_base = OTHER; note = 2'-O-methyladenosine
  modified_base 19: mod_base = OTHER; note = 2'-O-methyladenosine
  source 1..19: mol_type = other RNA
gcgaggtagcggtagtgaa

SEQ ID NO: 1006 - RNA, 21 nt, synthetic construct
  modified_base 1: mod_base = OTHER; note = 2'-O-methyladenosine
  modified_base 2: mod_base = gm
  modified_base 3: mod_base = gm
  modified_base 4: mod_base = gm
  modified_base 5: mod_base = gm
  modified_base 6: mod_base = cm
  modified_base 7: mod_base = gm
  modified_base 8: mod_base = OTHER; note = 2'-O-methyladenosine
  modified_base 9: mod_base = OTHER; note = 2'-fluoroguanosine
  modified_base 10: mod_base = OTHER; note = 2'-fluoroguanosine
  modified_base 11: mod_base = OTHER; note = 2'-fluorouridine
  modified_base 12: mod_base = gm
  modified_base 13: mod_base = um
  modified_base 14: mod_base = cm
  modified_base 15: mod_base = gm
  modified_base 16: mod_base = um
  modified_base 17: mod_base = gm
  modified_base 18: mod_base = cm
  modified_base 19: mod_base = um
  modified_base 20: mod_base = um
  modified_base 21: mod_base = OTHER; note = 2'-O-methyladenosine
  source 1..21: mol_type = other RNA
aggggcgaggtgtcgtgctta

SEQ ID NO: 1007 - RNA, 21 nt, synthetic construct
  modified_base 1: mod_base = cm
  modified_base 2: mod_base = cm
  modified_base 3: mod_base = cm
  modified_base 4: mod_base = cm
  modified_base 5: mod_base = gm
  modified_base 6: mod_base = OTHER; note = 2'-O-methyladenosine
  modified_base 7: mod_base = cm
  modified_base 8: mod_base = OTHER; note = 2'-O-methyladenosine
  modified_base 9: mod_base = OTHER; note = 2'-fluorouridine
  modified_base 10: mod_base = OTHER; note = 2'-fluorouridine
  modified_base 11: mod_base = OTHER; note = 2'-fluorocytidine
  modified_base 12: mod_base = cm
  modified_base 13: mod_base = um
  modified_base 14: mod_base = cm
  modified_base 15: mod_base = gm
  modified_base 16: mod_base = gm
  modified_base 17: mod_base = um
  modified_base 18: mod_base = OTHER; note = 2'-O-methyladenosine
  modified_base 19: mod_base = um
  modified_base 20: mod_base = um
  modified_base 21: mod_base = OTHER; note = 2'-O-methyladenosine
  source 1..21: mol_type = other RNA
ccccgacattcctcggtatta

SEQ ID NO: 1008 - RNA, 21 nt, synthetic construct
  modified_base 1: mod_base = um
  modified_base 2: mod_base = um
  modified_base 3: mod_base = cm
  modified_base 4: mod_base = cm
  modified_base 5: mod_base = um
  modified_base 6: mod_base = cm
  modified_base 7: mod_base = gm
  modified_base 8: mod_base = gm
  modified_base 9: mod_base = OTHER; note = 2'-fluorouridine
  modified_base 10: mod_base = OTHER; note = 2'-fluoroadenosine
  modified_base 11: mod_base = OTHER; note = 2'-fluorouridine
  modified_base 12: mod_base = um
  modified_base 13: mod_base = um
  modified_base 14: mod_base = OTHER; note = 2'-O-methyladenosine
  modified_base 15: mod_base = um
  modified_base 16: mod_base = um
  modified_base 17: mod_base = gm
  modified_base 18: mod_base = um
  modified_base 19: mod_base = cm
  modified_base 20: mod_base = um
  modified_base 21: mod_base = OTHER; note = 2'-O-methyladenosine
  source 1..21: mol_type = other RNA
ttcctcggtatttattgtcta

SEQ ID NO: 1009 - RNA, 21 nt, synthetic construct
  modified_base 1: mod_base = OTHER; note = 2'-O-methyladenosine
  modified_base 2: mod_base = cm
  modified_base 3: mod_base = um
  modified_base 4: mod_base = cm
  modified_base 5: mod_base = gm
  modified_base 6: mod_base = gm
  modified_base 7: mod_base = gm
  modified_base 8: mod_base = OTHER; note = 2'-O-methyladenosine
  modified_base 9: mod_base = OTHER; note = 2'-fluoroadenosine
  modified_base 10: mod_base = OTHER; note = 2'-fluoroadenosine
  modified_base 11: mod_base = OTHER; note = 2'-fluorouridine
  modified_base 12: mod_base = um
  modified_base 13: mod_base = um
  modified_base 14: mod_base = gm
  modified_base 15: mod_base = cm
  modified_base 16: mod_base = um
  modified_base 17: mod_base = um
  modified_base 18: mod_base = um
  modified_base 19: mod_base = um
  modified_base 20: mod_base = gm
  modified_base 21: mod_base = OTHER; note = 2'-O-methyladenosine
  source 1..21: mol_type = other RNA
actcgggaaatttgcttttga

SEQ ID NO: 1010 - RNA, 21 nt, synthetic construct
  modified_base 1: mod_base = gm
  modified_base 2: mod_base = gm
  modified_base 3: mod_base = OTHER; note = 2'-O-methyladenosine
  modified_base 4: mod_base = OTHER; note = 2'-O-methyladenosine
  modified_base 5: mod_base = OTHER; note = 2'-O-methyladenosine
  modified_base 6: mod_base = um
  modified_base 7: mod_base = um
  modified_base 8: mod_base = um
  modified_base 9: mod_base = OTHER; note = 2'-fluoroguanosine
  modified_base 10: mod_base = OTHER; note = 2'-fluorocytidine
  modified_base 11: mod_base = OTHER; note = 2'-fluorouridine
  modified_base 12: mod_base = um
  modified_base 13: mod_base = um
  modified_base 14: mod_base = um
  modified_base 15: mod_base = gm
  modified_base 16: mod_base = um
  modified_base 17: mod_base = cm
  modified_base 18: mod_base = OTHER; note = 2'-O-methyladenosine
  modified_base 19: mod_base = OTHER; note = 2'-O-methyladenosine
  modified_base 20: mod_base = OTHER; note = 2'-O-methyladenosine
  modified_base 21: mod_base = OTHER; note = 2'-O-methyladenosine
  source 1..21: mol_type = other RNA
ggaaatttgcttttgtcaaaa

SEQ ID NO: 1011 - RNA, 21 nt, synthetic construct
  modified_base 1: mod_base = um
  modified_base 2: mod_base = cm
  modified_base 3: mod_base = gm
  modified_base 4: mod_base = gm
  modified_base 5: mod_base = cm
  modified_base 6: mod_base = gm
  modified_base 7: mod_base = gm
  modified_base 8: mod_base = um
  modified_base 9: mod_base = OTHER; note = 2'-fluorouridine
  modified_base 10: mod_base = OTHER; note = 2'-fluorouridine
  modified_base 11: mod_base = OTHER; note = 2'-fluoroguanosine
  modified_base 12: mod_base = gm
  modified_base 13: mod_base = OTHER; note = 2'-O-methyladenosine
  modified_base 14: mod_base = um
  modified_base 15: mod_base = OTHER; note = 2'-O-methyladenosine
  modified_base 16: mod_base = um
  modified_base 17: mod_base = um
  modified_base 18: mod_base = um
  modified_base 19: mod_base = OTHER; note = 2'-O-methyl-2-aminoadenosine
  modified_base 20: mod_base = um
  modified_base 21: mod_base = um
  source 1..21: mol_type = other RNA
tcggcggtttggatatttntt

SEQ ID NO: 1012 - RNA, 21 nt, synthetic construct
  modified_base 1: mod_base = cm
  modified_base 2: mod_base = gm
  modified_base 3: mod_base = gm
  modified_base 4: mod_base = cm
  modified_base 5: mod_base = gm
  modified_base 6: mod_base = gm
  modified_base 7: mod_base = um
  modified_base 8: mod_base = um
  modified_base 9: mod_base = OTHER; note = 2'-fluorouridine
  modified_base 10: mod_base = OTHER; note = 2'-fluoroguanosine
  modified_base 11: mod_base = OTHER; note = 2'-fluoroguanosine
  modified_base 12: mod_base = OTHER; note = 2'-O-methyladenosine
  modified_base 13: mod_base = um
  modified_base 14: mod_base = OTHER; note = 2'-O-methyladenosine
  modified_base 15: mod_base = um
  modified_base 16: mod_base = um
  modified_base 17: mod_base = um
  modified_base 18: mod_base = OTHER; note = 2'-O-methyl-2-aminoadenosine
  modified_base 19: mod_base = um
  modified_base 20: mod_base = um
  modified_base 21: mod_base = OTHER; note = 2'-O-methyladenosine
  source 1..21: mol_type = other RNA
cggcggtttggatatttntta

SEQ ID NO: 1013 - RNA, 21 nt, synthetic construct
  modified_base 1: mod_base = OTHER; note = 2'-O-methyladenosine
  modified_base 2: mod_base = OTHER; note = 2'-O-methyladenosine
  modified_base 3: mod_base = cm
  modified_base 4: mod_base = cm
  modified_base 5: mod_base = cm
  modified_base 6: mod_base = cm
  modified_base 7: mod_base = OTHER; note = 2'-O-methyladenosine
  modified_base 8: mod_base = OTHER; note = 2'-O-methyladenosine
  modified_base 9: mod_base = OTHER; note = 2'-fluorouridine
  modified_base 10: mod_base = OTHER; note = 2'-fluorocytidine
  modified_base 11: mod_base = OTHER; note = 2'-fluorocytidine
  modified_base 12: mod_base = OTHER; note = 2'-O-methyladenosine
  modified_base 13: mod_base = cm
  modified_base 14: mod_base = gm
  modified_base 15: mod_base = um
  modified_base 16: mod_base = um
  modified_base 17: mod_base = um
  modified_base 18: mod_base = um
  modified_base 19: mod_base = gm
  modified_base 20: mod_base = gm
  modified_base 21: mod_base = OTHER; note = 2'-O-methyladenosine
  source 1..21: mol_type = other RNA
aaccccaatccacgttttgga

SEQ ID NO: 1014 - RNA, 21 nt, synthetic construct
  modified_base 1: mod_base = gm
  modified_base 2: mod_base = OTHER; note = 2'-O-methyladenosine
  modified_base 3: mod_base = um
  modified_base 4: mod_base = cm
  modified_base 5: mod_base = cm
  modified_base 6: mod_base = OTHER; note = 2'-O-methyladenosine
  modified_base 7: mod_base = cm
  modified_base 8: mod_base = gm
  modified_base 9: mod_base = OTHER; note = 2'-fluorouridine
  modified_base 10: mod_base = OTHER; note = 2'-fluorouridine
  modified_base 11: mod_base = OTHER; note = 2'-fluorouridine
  modified_base 12: mod_base = um
  modified_base 13: mod_base = gm
  modified_base 14: mod_base = gm
  modified_base 15: mod_base = OTHER; note = 2'-O-methyladenosine
  modified_base 16: mod_base = um
  modified_base 17: mod_base = OTHER; note = 2'-O-methylinosine
  modified_base 18: mod_base = cm
  modified_base 19: mod_base = OTHER; note = 2'-O-methyladenosine
  modified_base 20: mod_base = cm
  modified_base 21: mod_base = um
  source 1..21: mol_type = other RNA
gatccacgttttggatncact

SEQ ID NO: 1015 - RNA, 21 nt, synthetic construct
  modified_base 1: mod_base = OTHER; note = 2'-O-methyladenosine
  modified_base 2: mod_base = cm
  modified_base 3: mod_base = gm
  modified_base 4: mod_base = um
  modified_base 5: mod_base = um
  modified_base 6: mod_base = um
  modified_base 7: mod_base = um
  modified_base 8: mod_base = gm
  modified_base 9: mod_base = OTHER; note = 2'-fluoroguanosine
  modified_base 10: mod_base = OTHER; note = 2'-fluoroadenosine
  modified_base 11: mod_base = OTHER; note = 2'-fluorouridine
  modified_base 12: mod_base = gm
  modified_base 13: mod_base = cm
  modified_base 14: mod_base = OTHER; note = 2'-O-methyladenosine
  modified_base 15: mod_base = cm
  modified_base 16: mod_base = um
  modified_base 17: mod_base = OTHER; note = 2'-O-methylinosine
  modified_base 18: mod_base = OTHER; note = 2'-O-methyladenosine
  modified_base 19: mod_base = gm
  modified_base 20: mod_base = OTHER; note = 2'-O-methyladenosine
  modified_base 21: mod_base = OTHER; note = 2'-O-methyladenosine
  source 1..21: mol_type = other RNA
acgttttggatgcactnagaa

SEQ ID NO: 1016 - RNA, 21 nt, synthetic construct
  modified_base 1: mod_base = cm
  modified_base 2: mod_base = gm
  modified_base 3: mod_base = um
  modified_base 4: mod_base = um
  modified_base 5: mod_base = um
  modified_base 6: mod_base = um
  modified_base 7: mod_base = gm
  modified_base 8: mod_base = gm
  modified_base 9: mod_base = OTHER; note = 2'-fluoroadenosine
  modified_base 10: mod_base = OTHER; note = 2'-fluorouridine
  modified_base 11: mod_base = OTHER; note = 2'-fluoroguanosine
  modified_base 12: mod_base = cm
  modified_base 13: mod_base = OTHER; note = 2'-O-methyladenosine
  modified_base 14: mod_base = cm
  modified_base 15: mod_base = um
  modified_base 16: mod_base = OTHER; note = 2'-O-methylinosine
  modified_base 17: mod_base = OTHER; note = 2'-O-methyladenosine
  modified_base 18: mod_base = gm
  modified_base 19: mod_base = OTHER; note = 2'-O-methyladenosine
  modified_base 20: mod_base = cm
  modified_base 21: mod_base = OTHER; note = 2'-O-methyladenosine
  source 1..21: mol_type = other RNA
cgttttggatgcactnagaca

SEQ ID NO: 1017 - RNA, 21 nt, synthetic construct
  modified_base 1: mod_base = OTHER; note = 2'-O-methyladenosine
  modified_base 2: mod_base = um
  modified_base 3: mod_base = um
  modified_base 4: mod_base = cm
  modified_base 5: mod_base = cm
  modified_base 6: mod_base = um
  modified_base 7: mod_base = cm
  modified_base 8: mod_base = gm
  modified_base 9: mod_base = OTHER; note = 2'-fluoroguanosine
  modified_base 10: mod_base = OTHER; note = 2'-fluorouridine
  modified_base 11: mod_base = OTHER; note = 2'-fluoroadenosine
  modified_base 12: mod_base = um
  modified_base 13: mod_base = um
  modified_base 14: mod_base = um
  modified_base 15: mod_base = OTHER; note = 2'-O-methyladenosine
  modified_base 16: mod_base = um
  modified_base 17: mod_base = um
  modified_base 18: mod_base = gm
  modified_base 19: mod_base = um
  modified_base 20: mod_base = cm
  modified_base 21: mod_base = um
  source 1..21: mol_type = other RNA
attcctcggtatttattgtct

SEQ ID NO: 1018 - RNA, 21 nt, synthetic construct
  modified_base 1: mod_base = cm
  modified_base 2: mod_base = cm
  modified_base 3: mod_base = um
  modified_base 4: mod_base = cm
  modified_base 5: mod_base = gm
  modified_base 6: mod_base = gm
  modified_base 7: mod_base = um
  modified_base 8: mod_base = OTHER; note = 2'-O-methyladenosine
  modified_base 9: mod_base = OTHER; note = 2'-fluorouridine
  modified_base 10: mod_base = OTHER; note = 2'-fluorouridine
  modified_base 11: mod_base = OTHER; note = 2'-fluorouridine
  modified_base 12: mod_base = OTHER; note = 2'-O-methyladenosine
  modified_base 13: mod_base = um
  modified_base 14: mod_base = um
  modified_base 15: mod_base = gm
  modified_base 16: mod_base = um
  modified_base 17: mod_base = um
  modified_base 18: mod_base = um
  modified_base 19: mod_base = gm
  modified_base 20: mod_base = um
  modified_base 21: mod_base = OTHER; note = 2'-O-methyladenosine
  source 1..21: mol_type = other RNA
cctcggtatttattgtttgta

SEQ ID NO: 1019 - RNA, 21 nt, synthetic construct
  modified_base 1: mod_base = gm
  modified_base 2: mod_base = cm
  modified_base 3: mod_base = OTHER; note = 2'-O-methyladenosine
  modified_base 4: mod_base = um
  modified_base 5: mod_base = um
  modified_base 6: mod_base = cm
  modified_base 7: mod_base = cm
  modified_base 8: mod_base = um
  modified_base 9: mod_base = OTHER; note = 2'-fluorocytidine
  modified_base 10: mod_base = OTHER; note = 2'-fluoroguanosine
  modified_base 11: mod_base = OTHER; note = 2'-fluoroguanosine
  modified_base 12: mod_base = um
  modified_base 13: mod_base = OTHER; note = 2'-O-methyladenosine
  modified_base 14: mod_base = um
  modified_base 15: mod_base = um
  modified_base 16: mod_base = um
  modified_base 17: mod_base = OTHER; note = 2'-O-methyladenosine
  modified_base 18: mod_base = um
  modified_base 19: mod_base = um
  modified_base 20: mod_base = gm
  modified_base 21: mod_base = um
  source 1..21: mol_type = other RNA
gcattcctcggtatttattgt

SEQ ID NO: 1020 - RNA, 21 nt, synthetic construct
  modified_base 1: mod_base = cm
  modified_base 2: mod_base = cm
  modified_base 3: mod_base = um
  modified_base 4: mod_base = gm
  modified_base 5: mod_base = gm
  modified_base 6: mod_base = um
  modified_base 7: mod_base = cm
  modified_base 8: mod_base = OTHER; note = 2'-O-methyladenosine
  modified_base 9: mod_base = OTHER; note = 2'-fluorouridine
  modified_base 10: mod_base = OTHER; note = 2'-fluoroguanosine
  modified_base 11: mod_base = OTHER; note = 2'-fluoroguanosine
  modified_base 12: mod_base = OTHER; note = 2'-O-methyladenosine
  modified_base 13: mod_base = gm
  modified_base 14: mod_base = um
  modified_base 15: mod_base = OTHER; note = 2'-O-methyladenosine
  modified_base 16: mod_base = um
  modified_base 17: mod_base = um
  modified_base 18: mod_base = OTHER; note = 2'-O-methyladenosine
  modified_base 19: mod_base = cm
  modified_base 20: mod_base = gm
  modified_base 21: mod_base = um
  source 1..21: mol_type = other RNA
cctggtcatggagtattacgt

SEQ ID NO: 1021 - RNA, 21 nt, synthetic construct
  modified_base 1: mod_base = gm
  modified_base 2: mod_base = um
  modified_base 3: mod_base = cm
  modified_base 4: mod_base = cm
  modified_base 5: mod_base = um
  modified_base 6: mod_base = cm
  modified_base 7: mod_base = gm
  modified_base 8: mod_base = gm
  modified_base 9: mod_base = OTHER; note = 2'-fluorouridine
  modified_base 10: mod_base = OTHER; note = 2'-fluoroadenosine
  modified_base 11: mod_base = OTHER; note = 2'-fluorouridine
  modified_base 12: mod_base = um
  modified_base 13: mod_base = um
  modified_base 14: mod_base = OTHER; note = 2'-O-methyladenosine
  modified_base 15: mod_base = um
  modified_base 16: mod_base = um
  modified_base 17: mod_base = gm
  modified_base 18: mod_base = um
  modified_base 19: mod_base = cm
  modified_base 20: mod_base = um
  modified_base 21: mod_base = OTHER; note = 2'-O-methyladenosine
  source 1..21: mol_type = other RNA
gtcctcggtatttattgtcta

SEQ ID NO: 1022 - RNA, 21 nt, synthetic construct
  modified_base 1: mod_base = um
  modified_base 2: mod_base = um
  modified_base 3: mod_base = cm
  modified_base 4: mod_base = cm
  modified_base 5: mod_base = um
  modified_base 6: mod_base = cm
  modified_base 7: mod_base = gm
  modified_base 8: mod_base = gm
  modified_base 9: mod_base = OTHER; note = 2'-fluorouridine
  modified_base 10: mod_base = OTHER; note = 2'-O-methyladenosine
  modified_base 11: mod_base = OTHER; note = 2'-fluorouridine
  modified_base 12: mod_base = um
  modified_base 13: mod_base = OTHER; note = 2'-fluorouridine
  modified_base 14: mod_base = OTHER; note = 2'-O-methyladenosine
  modified_base 15: mod_base = um
  modified_base 16: mod_base = um
  modified_base 17: mod_base = gm
  modified_base 18: mod_base = um
  modified_base 19: mod_base = cm
  modified_base 20: mod_base = um
  modified_base 21: mod_base = OTHER; note = 2'-O-methyladenosine
  source 1..21: mol_type = other RNA
ttcctcggtatttattgtcta

SEQ ID NO: 1023 - RNA, 21 nt, synthetic construct
  modified_base 1: mod_base = cm
  modified_base 2: mod_base = cm
  modified_base 3: mod_base = um
  modified_base 4: mod_base = gm
  modified_base 5: mod_base = gm
  modified_base 6: mod_base = um
  modified_base 7: mod_base = cm
  modified_base 8: mod_base = OTHER; note = 2'-O-methyladenosine
  modified_base 9: mod_base = OTHER; note = 2'-fluorouridine
  modified_base 10: mod_base = gm
  modified_base 11: mod_base = OTHER; note = 2'-fluoroguanosine
  modified_base 12: mod_base = OTHER; note = 2'-O-methyladenosine
  modified_base 13: mod_base = OTHER; note = 2'-fluoroguanosine
  modified_base 14: mod_base = um
  modified_base 15: mod_base = OTHER; note = 2'-O-methyladenosine
  modified_base 16: mod_base = um
  modified_base 17: mod_base = um
  modified_base 18: mod_base = OTHER; note = 2'-O-methyladenosine
  modified_base 19: mod_base = cm
  modified_base 20: mod_base = gm
  modified_base 21: mod_base = um
  source 1..21: mol_type = other RNA
cctggtcatggagtattacgt

SEQ ID NO: 1024 - RNA, 21 nt, synthetic construct
  modified_base 1: mod_base = cm
  modified_base 2: mod_base = cm
  modified_base 3: mod_base = um
  modified_base 4: mod_base = gm
  modified_base 5: mod_base = gm
  modified_base 6: mod_base = um
  modified_base 7: mod_base = cm
  modified_base 8: mod_base = OTHER; note = 2'-O-methyladenosine
  modified_base 9: mod_base = OTHER; note = 2'-fluorouridine
  modified_base 10: mod_base = gm
  modified_base 11: mod_base = OTHER; note = 2'-fluoroguanosine
  modified_base 12: mod_base = OTHER; note = 2'-O-methyladenosine
  modified_base 13: mod_base = gm
  modified_base 14: mod_base = um
  modified_base 15: mod_base = OTHER; note = 2'-O-methyladenosine
  modified_base 16: mod_base = um
  modified_base 17: mod_base = um
  modified_base 18: mod_base = OTHER; note = 2'-O-methyladenosine
  modified_base 19: mod_base = cm
  modified_base 20: mod_base = gm
  modified_base 21: mod_base = um
  source 1..21: mol_type = other RNA
cctggtcatggagtattacgt

SEQ ID NO: 1025 - RNA, 21 nt, synthetic construct
  modified_base 1: mod_base = cm
  modified_base 2: mod_base = cm
  modified_base 3: mod_base = cm
  modified_base 4: mod_base = cm
  modified_base 5: mod_base = gm
  modified_base 6: mod_base = OTHER; note = 2'-O-methyladenosine
  modified_base 7: mod_base = cm
  modified_base 8: mod_base = OTHER; note = 2'-O-methyladenosine
  modified_base 9: mod_base = OTHER; note = 2'-fluorouridine
  modified_base 10: mod_base = OTHER; note = 2'-fluorouridine
  modified_base 11: mod_base = OTHER; note = 2'-fluorocytidine
  modified_base 12: mod_base = cm
  modified_base 13: mod_base = um
  modified_base 14: mod_base = cm
  modified_base 15: mod_base = gm
  modified_base 16: mod_base = gm
  modified_base 17: mod_base = um
  modified_base 18: mod_base = OTHER; note = 2'-O-methyladenosine
  modified_base 19: mod_base = um
  modified_base 20: mod_base = um
  modified_base 21: mod_base = OTHER; note = 2'-O-methyladenosine
  source 1..21: mol_type = other RNA
ccccgacattcctcggtatta

SEQ ID NO: 1026 - RNA, 21 nt, synthetic construct
  modified_base 1: mod_base = um
  modified_base 2: mod_base = um
  modified_base 3: mod_base = cm
  modified_base 4: mod_base = cm
  modified_base 5: mod_base = um
  modified_base 6: mod_base = cm
  modified_base 7: mod_base = gm
  modified_base 8: mod_base = gm
  modified_base 9: mod_base = OTHER; note = 2'-fluorouridine
  modified_base 10: mod_base = OTHER; note = 2'-fluoroadenosine
  modified_base 11: mod_base = OTHER; note = 2'-fluorouridine
  modified_base 12: mod_base = um
  modified_base 13: mod_base = um
  modified_base 14: mod_base = OTHER; note = 2'-O-methyladenosine
  modified_base 15: mod_base = um
  modified_base 16: mod_base = um
  modified_base 17: mod_base = gm
  modified_base 18: mod_base = um
  modified_base 19: mod_base = cm
  modified_base 20: mod_base = um
  modified_base 21: mod_base = OTHER; note = 2'-O-methyladenosine
  source 1..21: mol_type = other RNA
ttcctcggtatttattgtcta

SEQ ID NO: 1027 - RNA, 21 nt, synthetic construct
  modified_base 1: mod_base = um
  modified_base 2: mod_base = gm
  modified_base 3: mod_base = gm
  modified_base 4: mod_base = cm
  modified_base 5: mod_base = OTHER; note = 2'-O-methyladenosine
  modified_base 6: mod_base = OTHER; note = 2'-O-methyladenosine
  modified_base 7: mod_base = gm
  modified_base 8: mod_base = OTHER; note = 2'-O-methyladenosine
  modified_base 9: mod_base = OTHER; note = 2'-fluorouridine
  modified_base 10: mod_base = cm
  modified_base 11: mod_base = OTHER; note = 2'-fluoroguanosine
  modified_base 12: mod_base = um
  modified_base 13: mod_base = cm
  modified_base 14: mod_base = cm
  modified_base 15: mod_base = OTHER; note = 2'-O-methyladenosine
  modified_base 16: mod_base = cm
  modified_base 17: mod_base = um
  modified_base 18: mod_base = OTHER; note = 2'-O-methyladenosine
  modified_base 19: mod_base = cm
  modified_base 20: mod_base = OTHER; note = 2'-O-methyladenosine
  modified_base 21: mod_base = OTHER; note = 2'-O-methyladenosine
  source 1..21: mol_type = other RNA
tggcaagatcgtccactacaa

SEQ ID NO: 1028 - RNA, 21 nt, synthetic construct
  modified_base 1: mod_base = um
  modified_base 2: mod_base = gm
  modified_base 3: mod_base = gm
  modified_base 4: mod_base = cm
  modified_base 5: mod_base = OTHER; note = 2'-O-methyladenosine
  modified_base 6: mod_base = OTHER; note = 2'-O-methyladenosine
  modified_base 7: mod_base = OTHER; note = 2'-fluoroguanosine
  modified_base 8: mod_base = OTHER; note = 2'-O-methyladenosine
  modified_base 9: mod_base = OTHER; note = 2'-fluorouridine
  modified_base 10: mod_base = cm
  modified_base 11: mod_base = OTHER; note = 2'-fluoroguanosine
  modified_base 12: mod_base = um
  modified_base 13: mod_base = cm
  modified_base 14: mod_base = cm
  modified_base 15: mod_base = OTHER; note = 2'-O-methyladenosine
  modified_base 16: mod_base = cm
  modified_base 17: mod_base = um
  modified_base 18: mod_base = OTHER; note = 2'-O-methyladenosine
  modified_base 19: mod_base = cm
  modified_base 20: mod_base = OTHER; note = 2'-O-methyladenosine
  modified_base 21: mod_base = OTHER; note = 2'-O-methyladenosine
  source 1..21: mol_type = other RNA
tggcaagatcgtccactacaa

SEQ ID NO: 1029 - RNA, 21 nt, synthetic construct
  modified_base 1: mod_base = gm
  modified_base 2: mod_base = um
  modified_base 3: mod_base = cm
  modified_base 4: mod_base = cm
  modified_base 5: mod_base = um
  modified_base 6: mod_base = cm
  modified_base 7: mod_base = gm
  modified_base 8: mod_base = gm
  modified_base 9: mod_base = OTHER; note = 2'-fluorouridine
  modified_base 10: mod_base = OTHER; note = 2'-O-methyladenosine
  modified_base 11: mod_base = OTHER; note = 2'-fluorouridine
  modified_base 12: mod_base = um
  modified_base 13: mod_base = OTHER; note = 2'-fluorouridine
  modified_base 14: mod_base = OTHER; note = 2'-O-methyladenosine
  modified_base 15: mod_base = um
  modified_base 16: mod_base = um
  modified_base 17: mod_base = gm
  modified_base 18: mod_base = um
  modified_base 19: mod_base = cm
  modified_base 20: mod_base = um
  modified_base 21: mod_base = OTHER; note = 2'-O-methyladenosine
  source 1..21: mol_type = other RNA
gtcctcggtatttattgtcta

SEQ ID NO: 1030 - RNA, 21 nt, synthetic construct
  modified_base 1: mod_base = um
  modified_base 2: mod_base = um
  modified_base 3: mod_base = cm
  modified_base 4: mod_base = cm
  modified_base 5: mod_base = um
  modified_base 6: mod_base = cm
  modified_base 7: mod_base = gm
  modified_base 8: mod_base = gm
  modified_base 9: mod_base = OTHER; note = 2'-fluorouridine
  modified_base 10: mod_base = OTHER; note = 2'-O-methyladenosine
  modified_base 11: mod_base = OTHER; note = 2'-fluorouridine
  modified_base 12: mod_base = OTHER; note = 2'-fluorouridine
  modified_base 13: mod_base = um
  modified_base 14: mod_base = OTHER; note = 2'-O-methyladenosine
  modified_base 15: mod_base = um
  modified_base 16: mod_base = um
  modified_base 17: mod_base = gm
  modified_base 18: mod_base = um
  modified_base 19: mod_base = cm
  modified_base 20: mod_base = um
  modified_base 21: mod_base = OTHER; note = 2'-O-methyladenosine
  source 1..21: mol_type = other RNA
ttcctcggtatttattgtcta

SEQ ID NO: 1031 - RNA, 21 nt, synthetic construct
  modified_base 1: mod_base = OTHER; note = 2'-O-methyladenosine
  modified_base 2: mod_base = cm
  modified_base 3: mod_base = OTHER; note = 2'-O-methyladenosine
  modified_base 4: mod_base = OTHER; note = 2'-O-methyladenosine
  modified_base 5: mod_base = gm
  modified_base 6: mod_base = um
  modified_base 7: mod_base = gm
  modified_base 8: mod_base = gm
  modified_base 9: mod_base = OTHER; note = 2'-fluoroguanosine
  modified_base 10: mod_base = OTHER; note = 2'-fluoroadenosine
  modified_base 11: mod_base = OTHER; note = 2'-fluorocytidine
  modified_base 12: mod_base = OTHER; note = 2'-O-methyladenosine
  modified_base 13: mod_base = um
  modified_base 14: mod_base = gm
  modified_base 15: mod_base = cm
  modified_base 16: mod_base = um
  modified_base 17: mod_base = OTHER; note = 2'-O-methylinosine
  modified_base 18: mod_base = OTHER; note = 2'-O-methyladenosine
  modified_base 19: mod_base = OTHER; note = 2'-O-methyladenosine
  modified_base 20: mod_base = gm
  modified_base 21: mod_base = OTHER; note = 2'-O-methyladenosine
  source 1..21: mol_type = other RNA
acaagtgggacatgctnaaga

SEQ ID NO: 1032 - RNA, 21 nt, synthetic construct
  modified_base 1: mod_base = cm
  modified_base 2: mod_base = OTHER; note = 2'-O-methyladenosine
  modified_base 3: mod_base = OTHER; note = 2'-O-methyladenosine
  modified_base 4: mod_base = gm
  modified_base 5: mod_base = um
  modified_base 6: mod_base = gm
  modified_base 7: mod_base = gm
  modified_base 8: mod_base = gm
  modified_base 9: mod_base = OTHER; note = 2'-fluoroadenosine
  modified_base 10: mod_base = OTHER; note = 2'-fluorocytidine
  modified_base 11: mod_base = OTHER; note = 2'-fluoroadenosine
  modified_base 12: mod_base = um
  modified_base 13: mod_base = gm
  modified_base 14: mod_base = cm
  modified_base 15: mod_base = um
  modified_base 16: mod_base = OTHER; note = 2'-O-methylinosine
  modified_base 17: mod_base = OTHER; note = 2'-O-methyladenosine
  modified_base 18: mod_base = OTHER; note = 2'-O-methyladenosine
  modified_base 19: mod_base = gm
  modified_base 20: mod_base = OTHER; note = 2'-O-methyladenosine
  modified_base 21: mod_base = OTHER; note = 2'-O-methyladenosine
  source 1..21: mol_type = other RNA
caagtgggacatgctnaagaa

SEQ ID NO: 1033 - RNA, 21 nt, synthetic construct
  modified_base 1: mod_base = cm
  modified_base 2: mod_base = um
  modified_base 3: mod_base = um
  modified_base 4: mod_base = cm
  modified_base 5: mod_base = cm
  modified_base 6: mod_base = OTHER; note = 2'-O-methyladenosine
  modified_base 7: mod_base = gm
  modified_base 8: mod_base = gm
  modified_base 9: mod_base = OTHER; note = 2'-fluoroadenosine
  modified_base 10: mod_base = OTHER; note = 2'-fluorouridine
  modified_base 11: mod_base = OTHER; note = 2'-fluoroguanosine
  modified_base 12: mod_base = OTHER; note = 2'-O-methyladenosine
  modified_base 13: mod_base = gm
  modified_base 14: mod_base = OTHER; note = 2'-O-methyladenosine
  modified_base 15: mod_base = OTHER; note = 2'-O-methyladenosine
  modified_base 16: mod_base = cm
  modified_base 17: mod_base = um
  modified_base 18: mod_base = OTHER; note = 2'-O-methyladenosine
  modified_base 19: mod_base = cm
  modified_base 20: mod_base = um
  modified_base 21: mod_base = um
  source 1..21: mol_type = other RNA
cttccaggatgagaactactt

SEQ ID NO: 1034 - RNA, 21 nt, synthetic construct
  modified_base 1: mod_base = cm
  modified_base 2: mod_base = um
  modified_base 3: mod_base = um
  modified_base 4: mod_base = cm
  modified_base 5: mod_base = cm
  modified_base 6: mod_base = OTHER; note = 2'-O-methyladenosine
  modified_base 7: mod_base = gm
  modified_base 8: mod_base = gm
  modified_base 9: mod_base = OTHER; note = 2'-fluoroadenosine
  modified_base 10: mod_base = OTHER; note = 2'-fluorouridine
  modified_base 11: mod_base = OTHER; note = 2'-fluoroguanosine
  modified_base 12: mod_base = OTHER; note = 2'-O-methyladenosine
  modified_base 13: mod_base = gm
  modified_base 14: mod_base = OTHER; note = 2'-O-methyladenosine
  modified_base 15: mod_base = OTHER; note = 2'-O-methyladenosine
  modified_base 16: mod_base = cm
  modified_base 17: mod_base = um
  modified_base 18: mod_base = OTHER; note = 2'-O-methyladenosine
  modified_base 19: mod_base = um
  modified_base 20: mod_base = cm
  modified_base 21: mod_base = um
  source 1..21: mol_type = other RNA
cttccaggatgagaactatct

SEQ ID NO: 1035 - RNA, 21 nt, synthetic construct
  modified_base 1: mod_base = um
  modified_base 2: mod_base = cm
  modified_base 3: mod_base = cm
  modified_base 4: mod_base = OTHER; note = 2'-O-methyladenosine
  modified_base 5: mod_base = gm
  modified_base 6: mod_base = gm
  modified_base 7: mod_base = OTHER; note = 2'-O-methyladenosine
  modified_base 8: mod_base = um
  modified_base 9: mod_base = OTHER; note = 2'-fluoroguanosine
  modified_base 10: mod_base = OTHER; note = 2'-fluoroadenosine
  modified_base 11: mod_base = OTHER; note = 2'-fluoroguanosine
  modified_base 12: mod_base = OTHER; note = 2'-O-methyladenosine
  modified_base 13: mod_base = OTHER; note = 2'-O-methyladenosine
  modified_base 14: mod_base = cm
  modified_base 15: mod_base = um
  modified_base 16: mod_base = OTHER; note = 2'-O-methyladenosine
  modified_base 17: mod_base = cm
  modified_base 18: mod_base = cm
  modified_base 19: mod_base = um
  modified_base 20: mod_base = OTHER; note = 2'-O-methylinosine
  modified_base 21: mod_base = um
  source 1..21: mol_type = other RNA
tccaggatgagaactacctnt

SEQ ID NO: 1036 - RNA, 21 nt, synthetic construct
  modified_base 1: mod_base = um
  modified_base 2: mod_base = cm
  modified_base 3: mod_base = cm
  modified_base 4: mod_base = OTHER; note = 2'-O-methyladenosine
  modified_base 5: mod_base = gm
  modified_base 6: mod_base = gm
  modified_base 7: mod_base = OTHER; note = 2'-O-methyladenosine
  modified_base 8: mod_base = um
  modified_base 9: mod_base = OTHER; note = 2'-fluoroguanosine
  modified_base 10: mod_base = OTHER; note = 2'-fluoroadenosine
  modified_base 11: mod_base = OTHER; note = 2'-fluoroguanosine
  modified_base 12: mod_base = OTHER; note = 2'-O-methyladenosine
  modified_base 13: mod_base = OTHER; note = 2'-O-methyladenosine
  modified_base 14: mod_base = cm
  modified_base 15: mod_base = um
  modified_base 16: mod_base = OTHER; note = 2'-O-methyladenosine
  modified_base 17: mod_base = cm
  modified_base 18: mod_base = um
  modified_base 19: mod_base = um
  modified_base 20: mod_base = gm
  modified_base 21: mod_base = um
  source 1..21: mol_type = other RNA
tccaggatgagaactacttgt

SEQ ID NO: 1037 - RNA, 21 nt, synthetic construct
  modified_base 1: mod_base = OTHER; note = 2'-O-methyladenosine
  modified_base 2: mod_base = gm
  modified_base 3: mod_base = gm
  modified_base 4: mod_base = OTHER; note = 2'-O-methyladenosine
  modified_base 5: mod_base = um
  modified_base 6: mod_base = gm
  modified_base 7: mod_base = OTHER; note = 2'-O-methyladenosine
  modified_base 8: mod_base = gm
  modified_base 9: mod_base = OTHER; note = 2'-fluoroadenosine
  modified_base 10: mod_base = OTHER; note = 2'-fluoroadenosine
  modified_base 11: mod_base = OTHER; note = 2'-fluorocytidine
  modified_base 12: mod_base = um
  modified_base 13: mod_base = OTHER; note = 2'-O-methyladenosine
  modified_base 14: mod_base = cm
  modified_base 15: mod_base = cm
  modified_base 16: mod_base = um
  modified_base 17: mod_base = OTHER; note = 2'-O-methylinosine
  modified_base 18: mod_base = um
  modified_base 19: mod_base = OTHER; note = 2'-O-methyladenosine
  modified_base 20: mod_base = cm
  modified_base 21: mod_base = OTHER; note = 2'-O-methyladenosine
  source 1..21: mol_type = other RNA
aggatgagaactacctntaca

SEQ ID NO: 1038 - RNA, 21 nt, synthetic construct
  modified_base 1: mod_base = cm
  modified_base 2: mod_base = um
  modified_base 3: mod_base = OTHER; note = 2'-O-methyladenosine
  modified_base 4: mod_base = cm
  modified_base 5: mod_base = cm
  modified_base 6: mod_base = um
  modified_base 7: mod_base = gm
  modified_base 8: mod_base = um
  modified_base 9: mod_base = OTHER; note = 2'-fluoroadenosine
  modified_base 10: mod_base = OTHER; note = 2'-fluorocytidine
  modified_base 11: mod_base = OTHER; note = 2'-fluorocytidine
  modified_base 12: mod_base = um
  modified_base 13: mod_base = gm
  modified_base 14: mod_base = gm
  modified_base 15: mod_base = um
  modified_base 16: mod_base = cm
  modified_base 17: mod_base = OTHER; note = 2'-O-methyladenosine
  modified_base 18: mod_base = um
  modified_base 19: mod_base = OTHER; note = 2'-O-methylinosine
  modified_base 20: mod_base = gm
  modified_base 21: mod_base = OTHER; note = 2'-O-methyladenosine
  source 1..21: mol_type = other RNA
ctacctgtacctggtcatnga

SEQ ID NO: 1039 - RNA, 21 nt, synthetic construct
  modified_base 1: mod_base = cm
  modified_base 2: mod_base = um
  modified_base 3: mod_base = OTHER; note = 2'-O-methyladenosine
  modified_base 4: mod_base = cm
  modified_base 5: mod_base = cm
  modified_base 6: mod_base = um
  modified_base 7: mod_base = gm
  modified_base 8: mod_base = um
  modified_base 9: mod_base = OTHER; note = 2'-fluoroadenosine
  modified_base 10: mod_base = OTHER; note = 2'-fluorocytidine
  modified_base 11: mod_base = OTHER; note = 2'-fluorocytidine
  modified_base 12: mod_base = um
  modified_base 13: mod_base = gm
  modified_base 14: mod_base = gm
  modified_base 15: mod_base = um
  modified_base 16: mod_base = um
  modified_base 17: mod_base = OTHER; note = 2'-O-methyladenosine
  modified_base 18: mod_base = um
  modified_base 19: mod_base = gm
  modified_base 20: mod_base = gm
  modified_base 21: mod_base = OTHER; note = 2'-O-methyladenosine
  source 1..21: mol_type = other RNA
ctacctgtacctggttatgga

SEQ ID NO: 1040 - RNA, 21 nt, synthetic construct
  modified_base 1: mod_base = OTHER; note = 2'-O-methyladenosine
  modified_base 2: mod_base = cm
  modified_base 3: mod_base = OTHER; note = 2'-O-methyladenosine
  modified_base 4: mod_base = cm
  modified_base 5: mod_base = um
  modified_base 6: mod_base = gm
  modified_base 7: mod_base = cm
  modified_base 8: mod_base = um
  modified_base 9: mod_base = OTHER; note = 2'-fluoroguanosine
  modified_base 10: mod_base = OTHER; note = 2'-fluoroadenosine
  modified_base 11: mod_base = OTHER; note = 2'-fluoroguanosine
  modified_base 12: mod_base = cm
  modified_base 13: mod_base = OTHER; note = 2'-O-methyladenosine
  modified_base 14: mod_base = OTHER; note = 2'-O-methyladenosine
  modified_base 15: mod_base = gm
  modified_base 16: mod_base = um
  modified_base 17: mod_base = um
  modified_base 18: mod_base = um
  modified_base 19: mod_base = OTHER; note = 2'-O-methylinosine
  modified_base 20: mod_base = gm
  modified_base 21: mod_base = OTHER; note = 2'-O-methyladenosine
  source 1..21: mol_type = other RNA
acactgctgagcaagtttnga

SEQ ID NO: 1041 - RNA, 21 nt, synthetic construct
  modified_base 1: mod_base = cm
  modified_base 2: mod_base = um
  modified_base 3: mod_base = OTHER; note = 2'-O-methyladenosine
  modified_base 4: mod_base = cm
  modified_base 5: mod_base = OTHER; note = 2'-O-methyladenosine
  modified_base 6: mod_base = OTHER; note = 2'-O-methyladenosine
  modified_base 7: mod_base = gm
  modified_base 8: mod_base = gm
  modified_base 9: mod_base = OTHER; note = 2'-fluoroadenosine
  modified_base 10: mod_base = OTHER; note = 2'-fluoroguanosine
  modified_base 11: mod_base = OTHER; note = 2'-fluorocytidine
  modified_base 12: mod_base = OTHER; note = 2'-O-methyladenosine
  modified_base 13: mod_base = cm
  modified_base 14: mod_base = cm
  modified_base 15: mod_base = um
  modified_base 16: mod_base = cm
  modified_base 17: mod_base = um
  modified_base 18: mod_base = um
  modified_base 19: mod_base = um
  modified_base 20: mod_base = cm
  modified_base 21: mod_base = um
  source 1..21: mol_type = other RNA
ctacaaggagcacctctttct

SEQ ID NO: 1042 - RNA, 21 nt, synthetic construct
  modified_base 1: mod_base = cm
  modified_base 2: mod_base = um
  modified_base 3: mod_base = OTHER; note = 2'-O-methyladenosine
  modified_base 4: mod_base = cm
  modified_base 5: mod_base = OTHER; note = 2'-O-methyladenosine
  modified_base 6: mod_base = OTHER; note = 2'-O-methyladenosine
  modified_base 7: mod_base = gm
  modified_base 8: mod_base = gm
  modified_base 9: mod_base = OTHER; note = 2'-fluoroadenosine
  modified_base 10: mod_base = OTHER; note = 2'-fluoroguanosine
  modified_base 11: mod_base = OTHER; note = 2'-fluorocytidine
  modified_base 12: mod_base = OTHER; note = 2'-O-methyladenosine
  modified_base 13: mod_base = cm
  modified_base 14: mod_base = cm
  modified_base 15: mod_base = um
  modified_base 16: mod_base = um
  modified_base 17: mod_base = um
  modified_base 18: mod_base = cm
  modified_base 19: mod_base = um
  modified_base 20: mod_base = cm
  modified_base 21: mod_base = um
  source 1..21: mol_type = other RNA
ctacaaggagcacctttctct

SEQ ID NO: 1043 - RNA, 21 nt, synthetic construct
  modified_base 1: mod_base = cm
  modified_base 2: mod_base = gm
  modified_base 3: mod_base = gm
  modified_base 4: mod_base = OTHER; note = 2'-O-methyladenosine
  modified_base 5: mod_base = cm
  modified_base 6: mod_base = OTHER; note = 2'-O-methyladenosine
  modified_base 7: mod_base = cm
  modified_base 8: mod_base = OTHER; note = 2'-O-methyladenosine
  modified_base 9: mod_base = OTHER; note = 2'-fluorouridine
  modified_base 10: mod_base = OTHER; note = 2'-fluorocytidine
  modified_base 11: mod_base = OTHER; note = 2'-fluorocytidine
  modified_base 12: mod_base = cm
  modified_base 13: mod_base = um
  modified_base 14: mod_base = um
  modified_base 15: mod_base = cm
  modified_base 16: mod_base = um
  modified_base 17: mod_base = um
  modified_base 18: mod_base = cm
  modified_base 19: mod_base = um
  modified_base 20: mod_base = um
  modified_base 21: mod_base = um
  source 1..21: mol_type = other RNA
cggacacatcccttcttcttt

SEQ ID NO: 1044 - RNA, 21 nt, synthetic construct
  modified_base 1: mod_base = gm
  modified_base 2: mod_base = OTHER; note = 2'-O-methyladenosine
  modified_base 3: mod_base = cm
  modified_base 4: mod_base = OTHER; note = 2'-O-methyladenosine
  modified_base 5: mod_base = cm
  modified_base 6: mod_base = OTHER; note = 2'-O-methyladenosine
  modified_base 7: mod_base = um
  modified_base 8: mod_base = cm
  modified_base 9: mod_base = OTHER; note = 2'-fluorocytidine
  modified_base 10: mod_base = OTHER; note = 2'-fluorocytidine
  modified_base 11: mod_base = OTHER; note = 2'-fluorouridine
  modified_base 12: mod_base = um
  modified_base 13: mod_base = cm
  modified_base 14: mod_base = um
  modified_base 15: mod_base = um
  modified_base 16: mod_base = cm
  modified_base 17: mod_base = um
  modified_base 18: mod_base = um
  modified_base 19: mod_base = um
  modified_base 20: mod_base = gm
  modified_base 21: mod_base = OTHER; note = 2'-O-methyladenosine
  source 1..21: mol_type = other RNA
gacacatcccttcttctttga

SEQ ID NO: 1045 - RNA, 21 nt, synthetic construct
  modified_base 1: mod_base = cm
  modified_base 2: mod_base = cm
  modified_base 3: mod_base = um
  modified_base 4: mod_base = um
  modified_base 5: mod_base = um
  modified_base 6: mod_base = OTHER; note = 2'-O-methyladenosine
  modified_base 7: mod_base = cm
  modified_base 8: mod_base = OTHER; note = 2'-O-methyladenosine
  modified_base 9: mod_base = OTHER; note = 2'-fluorocytidine
  modified_base 10: mod_base = OTHER; note = 2'-fluorocytidine
  modified_base 11: mod_base = OTHER; note = 2'-fluoroguanosine
  modified_base 12: mod_base = gm
  modified_base 13: mod_base = OTHER; note = 2'-O-methyladenosine
  modified_base 14: mod_base = um
  modified_base 15: mod_base = um
  modified_base 16: mod_base = um
  modified_base 17: mod_base = cm
  modified_base 18: mod_base = gm
  modified_base 19: mod_base = OTHER; note = 2'-O-methyladenosine
  modified_base 20: mod_base = OTHER; note = 2'-O-methyladenosine
  modified_base 21: mod_base = OTHER; note = 2'-O-methyladenosine
  source 1..21: mol_type = other RNA
cctttacaccggatttcgaaa

SEQ ID NO: 1046 - RNA, 21 nt, synthetic construct
  modified_base 1: mod_base = um
  modified_base 2: mod_base = OTHER; note = 2'-O-methyladenosine
  modified_base 3: mod_base = cm
  modified_base 4: mod_base = OTHER; note = 2'-O-methyladenosine
  modified_base 5: mod_base = cm
  modified_base 6: mod_base = cm
  modified_base 7: mod_base = gm
  modified_base 8: mod_base = gm
  modified_base 9: mod_base = OTHER; note = 2'-fluoroadenosine
  modified_base 10: mod_base = OTHER; note = 2'-fluorouridine
  modified_base 11: mod_base = OTHER; note = 2'-fluorouridine
  modified_base 12: mod_base = um
  modified_base 13: mod_base = cm
  modified_base 14: mod_base = gm
  modified_base 15: mod_base = OTHER; note = 2'-O-methyladenosine
  modified_base 16: mod_base = OTHER; note = 2'-O-methyladenosine
  modified_base 17: mod_base = gm
  modified_base 18: mod_base = OTHER; note = 2'-O-methylinosine
  modified_base 19: mod_base = um
  modified_base 20: mod_base = gm
  modified_base 21: mod_base = OTHER; note = 2'-O-methyladenosine
  source 1..21: mol_type = other RNA
tacaccggatttcgaagntga

SEQ ID NO: 1047 - RNA, 21 nt, synthetic construct
  modified_base 1: mod_base = cm
  modified_base 2: mod_base = OTHER; note = 2'-O-methyladenosine
  modified_base 3: mod_base = cm
  modified_base 4: mod_base = cm
  modified_base 5: mod_base = gm
  modified_base 6: mod_base = OTHER; note = 2'-O-methyladenosine
  modified_base 7: mod_base = cm
  modified_base 8: mod_base = OTHER; note = 2'-O-methyladenosine
  modified_base 9: mod_base = OTHER; note = 2'-fluorocytidine
  modified_base 10: mod_base = OTHER; note = 2'-fluoroadenosine
  modified_base 11: mod_base = OTHER; note = 2'-fluorouridine
  modified_base 12: mod_base = gm
  modified_base 13: mod_base = cm
  modified_base 14: mod_base = OTHER; note = 2'-O-methyladenosine
  modified_base 15: mod_base = OTHER; note = 2'-O-methyladenosine
  modified_base 16: mod_base = cm
  modified_base 17: mod_base = um
  modified_base 18: mod_base = um
  modified_base 19: mod_base = cm
  modified_base 20: mod_base = OTHER; note = 2'-O-methylinosine
  modified_base 21: mod_base = OTHER; note = 2'-O-methyladenosine
  source 1..21: mol_type = other RNA
caccgacacatgcaacttcna

SEQ ID NO: 1048 - RNA, 21 nt, synthetic construct
  modified_base 1: mod_base = cm
  modified_base 2: mod_base = cm
  modified_base 3: mod_base = gm
  modified_base 4: mod_base = OTHER; note = 2'-O-methyladenosine
  modified_base 5: mod_base = cm
  modified_base 6: mod_base = OTHER; note = 2'-O-methyladenosine
  modified_base 7: mod_base = cm
  modified_base 8: mod_base = OTHER; note = 2'-O-methyladenosine
  modified_base 9: mod_base = OTHER; note = 2'-fluorouridine
  modified_base 10: mod_base = OTHER; note = 2'-fluoroguanosine
  modified_base 11: mod_base = OTHER; note = 2'-fluorocytidine
  modified_base 12: mod_base = OTHER; note = 2'-O-methyladenosine
  modified_base 13: mod_base = OTHER; note = 2'-O-methyladenosine
  modified_base 14: mod_base = cm
  modified_base 15: mod_base = um
  modified_base 16: mod_base = um
  modified_base 17: mod_base = cm
  modified_base 18: mod_base = OTHER; note = 2'-O-methylinosine
  modified_base 19: mod_base = OTHER; note = 2'-O-methyladenosine
  modified_base 20: mod_base = cm
  modified_base 21: mod_base = um
  source 1..21: mol_type = other RNA
ccgacacatgcaacttcnact

SEQ ID NO: 1049 - RNA, 21 nt, synthetic construct
  modified_base 1: mod_base = OTHER; note = 2'-O-methyladenosine
  modified_base 2: mod_base = cm
  modified_base 3: mod_base = OTHER; note = 2'-O-methyladenosine
  modified_base 4: mod_base = um
  modified_base 5: mod_base = gm
  modified_base 6: mod_base = cm
  modified_base 7: mod_base = OTHER; note = 2'-O-methyladenosine
  modified_base 8: mod_base = OTHER; note = 2'-O-methyladenosine
  modified_base 9: mod_base = OTHER; note = 2'-fluorocytidine
  modified_base 10: mod_base = OTHER; note = 2'-fluorouridine
  modified_base 11: mod_base = OTHER; note = 2'-fluorouridine
  modified_base 12: mod_base = cm
  modified_base 13: mod_base = gm
  modified_base 14: mod_base = OTHER; note = 2'-O-methyladenosine
  modified_base 15: mod_base = cm
  modified_base 16: mod_base = um
  modified_base 17: mod_base = um
  modified_base 18: mod_base = OTHER; note = 2'-O-methylinosine
  modified_base 19: mod_base = gm
  modified_base 20: mod_base = um
  modified_base 21: mod_base = OTHER; note = 2'-O-methyladenosine
  source 1..21: mol_type = other RNA
acatgcaacttcgacttngta

SEQ ID NO: 1050 - RNA, 21 nt, synthetic construct
  modified_base 1: mod_base = cm
  modified_base 2: mod_base = cm
  modified_base 3: mod_base = um
  modified_base 4: mod_base = gm
  modified_base 5: mod_base = gm
  modified_base 6: mod_base = um
  modified_base 7: mod_base = cm
  modified_base 8: mod_base = OTHER; note = 2'-O-methyladenosine
  modified_base 9: mod_base = OTHER; note = 2'-fluorouridine
  modified_base 10: mod_base = gm
  modified_base 11: mod_base = OTHER; note = 2'-fluoroguanosine
  modified_base 12: mod_base = OTHER; note = 2'-fluoroadenosine
  modified_base 13: mod_base = gm
  modified_base 14: mod_base = um
  modified_base 15: mod_base = OTHER; note = 2'-O-methyladenosine
  modified_base 16: mod_base = um
  modified_base 17: mod_base = um
  modified_base 18: mod_base = OTHER; note = 2'-O-methyladenosine
  modified_base 19: mod_base = cm
  modified_base 20: mod_base = gm
  modified_base 21: mod_base = um
  source 1..21: mol_type = other RNA
cctggtcatggagtattacgt

SEQ ID NO: 1051 - RNA, 21 nt, synthetic construct
  modified_base 1: mod_base = cm
  modified_base 2: mod_base = cm
  modified_base 3: mod_base = um
  modified_base 4: mod_base = cm
  modified_base 5: mod_base = gm
  modified_base 6: mod_base = gm
  modified_base 7: mod_base = um
  modified_base 8: mod_base = OTHER; note = 2'-O-methyladenosine
  modified_base 9: mod_base = OTHER; note = 2'-fluorouridine
  modified_base 10: mod_base = OTHER; note = 2'-fluorouridine
  modified_base 11: mod_base = OTHER; note = 2'-fluorouridine
  modified_base 12: mod_base = OTHER; note = 2'-O-methyladenosine
  modified_base 13: mod_base = um
  modified_base 14: mod_base = um
  modified_base 15: mod_base = gm
  modified_base 16: mod_base = um
  modified_base 17: mod_base = um
  modified_base 18: mod_base = um
  modified_base 19: mod_base = gm
  modified_base 20: mod_base = um
  modified_base 21: mod_base = OTHER; note = 2'-O-methyladenosine
  source 1..21: mol_type = other RNA
cctcggtatttattgtttgta

SEQ ID NO: 1052 - RNA, 21 nt, synthetic construct
  modified_base 1: mod_base = cm
  modified_base 2: mod_base = cm
  modified_base 3: mod_base = um
  modified_base 4: mod_base = cm
  modified_base 5: mod_base = gm
  modified_base 6: mod_base = gm
  modified_base 7: mod_base = um
  modified_base 8: mod_base = OTHER; note = 2'-O-methyladenosine
  modified_base 9: mod_base = OTHER; note = 2'-fluorouridine
  modified_base 10: mod_base = OTHER; note = 2'-fluorouridine
  modified_base 11: mod_base = OTHER; note = 2'-fluorouridine
  modified_base 12: mod_base = OTHER; note = 2'-O-methyladenosine
  modified_base 13: mod_base = um
  modified_base 14: mod_base = um
  modified_base 15: mod_base = gm
  modified_base 16: mod_base = um
  modified_base 17: mod_base = cm
  modified_base 18: mod_base = um
  modified_base 19: mod_base = gm
  modified_base 20: mod_base = um
  modified_base 21: mod_base = OTHER; note = 2'-O-methyladenosine
  source 1..21: mol_type = other RNA
cctcggtatttattgtctgta

SEQ ID NO: 1053 - RNA, 21 nt, synthetic construct
  modified_base 1: mod_base = cm
  modified_base 2: mod_base = cm
  modified_base 3: mod_base = um
  modified_base 4: mod_base = cm
  modified_base 5: mod_base = gm
  modified_base 6: mod_base = gm
  modified_base 7: mod_base = um
  modified_base 8: mod_base = OTHER; note = 2'-O-methyladenosine
  modified_base 9: mod_base = OTHER; note = 2'-fluorouridine
  modified_base 10: mod_base = OTHER; note = 2'-fluorouridine
  modified_base 11: mod_base = OTHER; note = 2'-fluorouridine
  modified_base 12: mod_base = OTHER; note = 2'-O-methyladenosine
  modified_base 13: mod_base = um
  modified_base 14: mod_base = um
  modified_base 15: mod_base = gm
  modified_base 16: mod_base = um
  modified_base 17: mod_base = cm
  modified_base 18: mod_base = um
  modified_base 19: mod_base = OTHER; note = 2'-O-methylinosine
  modified_base 20: mod_base = um
  modified_base 21: mod_base = OTHER; note = 2'-O-methyladenosine
  source 1..21: mol_type = other RNA
cctcggtatttattgtctnta

SEQ ID NO: 1054 - RNA, 21 nt, synthetic construct
  modified_base 1: mod_base = cm
  modified_base 2: mod_base = cm
  modified_base 3: mod_base = um
  modified_base 4: mod_base = gm
  modified_base 5: mod_base = gm
  modified_base 6: mod_base = um
  modified_base 7: mod_base = cm
  modified_base 8: mod_base = OTHER; note = 2'-O-methyladenosine
  modified_base 9: mod_base = OTHER; note = 2'-fluorouridine
  modified_base 10: mod_base = gm
  modified_base 11: mod_base = OTHER; note = 2'-fluoroguanosine
  modified_base 12: mod_base = OTHER; note = 2'-fluoroadenosine
  modified_base 13: mod_base = gm
  modified_base 14: mod_base = um
  modified_base 15: mod_base = OTHER; note = 2'-O-methyladenosine
  modified_base 16: mod_base = um
  modified_base 17: mod_base = um
  modified_base 18: mod_base = OTHER; note = 2'-O-methyladenosine
  modified_base 19: mod_base = cm
  modified_base 20: mod_base = gm
  modified_base 21: mod_base = OTHER; note = 2'-O-methyladenosine
  source 1..21: mol_type = other RNA
cctggtcatggagtattacga

SEQ ID NO: 1055 - RNA, 19 nt, synthetic construct
  modified_base 1: mod_base = cm
  modified_base 1^2: mod_base = OTHER; note = phosphorothioate linkage
  modified_base 2: mod_base = cm
  modified_base 2^3: mod_base = OTHER; note = phosphorothioate linkage
  modified_base 3: mod_base = cm
  modified_base 4: mod_base = um
  modified_base 5: mod_base = OTHER; note = 2'-O-methyladenosine
  modified_base 6: mod_base = gm
  modified_base 7: mod_base = OTHER; note = 2'-fluoroadenosine
  modified_base 8: mod_base = OTHER; note = 2'-fluoroadenosine
  modified_base 9: mod_base = OTHER; note = 2'-fluorocytidine
  modified_base 10: mod_base = um
  modified_base 11: mod_base = gm
  modified_base 12: mod_base = um
  modified_base 13: mod_base = cm
  modified_base 14: mod_base = um
  modified_base 15: mod_base = um
  modified_base 16: mod_base = cm
  modified_base 17: mod_base = gm
  modified_base 17^18: mod_base = OTHER; note = phosphorothioate linkage
  modified_base 18: mod_base = OTHER; note = 2'-O-methyladenosine
  modified_base 18^19: mod_base = OTHER; note = phosphorothioate linkage
  modified_base 19: mod_base = OTHER; note = 2'-O-methyladenosine
  source 1..19: mol_type = other RNA
ccctagaactgtcttcgaa

SEQ ID NO: 1056 - RNA, 21 nt, synthetic construct
  modified_base 1: mod_base = um
  modified_base 2: mod_base = um
  modified_base 3: mod_base = cm
  modified_base 4: mod_base = cm
  modified_base 5: mod_base = um
  modified_base 6: mod_base = cm
  modified_base 7: mod_base = gm
  modified_base 8: mod_base = gm
  modified_base 9: mod_base = OTHER; note = 2'-fluorouridine
  modified_base 10: mod_base = OTHER; note = 2'-O-methyladenosine
  modified_base 11: mod_base = OTHER; note = 2'-fluorouridine
  modified_base 12: mod_base = OTHER; note = 2'-fluorouridine
  modified_base 13: mod_base = um
  modified_base 14: mod_base = OTHER; note = 2'-O-methyladenosine
  modified_base 15: mod_base = um
  modified_base 16: mod_base = um
  modified_base 17: mod_base = gm
  modified_base 18: mod_base = um
  modified_base 19: mod_base = cm
  modified_base 20: mod_base = um
  modified_base 21: mod_base = OTHER; note = 2'-O-methyladenosine
  source 1..21: mol_type = other RNA
ttcctcggtatttattgtcta

SEQ ID NO: 1057 - RNA, 21 nt, synthetic construct
  modified_base 1: mod_base = cm
  modified_base 2: mod_base = OTHER; note = 2'-O-methyladenosine
  modified_base 3: mod_base = cm
  modified_base 4: mod_base = cm
  modified_base 5: mod_base = gm
  modified_base 6: mod_base = OTHER; note = 2'-O-methyladenosine
  modified_base 7: mod_base = cm
  modified_base 8: mod_base = OTHER; note = 2'-O-methyladenosine
  modified_base 9: mod_base = OTHER; note = 2'-fluorocytidine
  modified_base 10: mod_base = OTHER; note = 2'-O-methyladenosine
  modified_base 11: mod_base = OTHER; note = 2'-fluorouridine
  modified_base 12: mod_base = gm
  modified_base 13: mod_base = OTHER; note = 2'-fluorocytidine
  modified_base 14: mod_base = OTHER; note = 2'-O-methyladenosine
  modified_base 15: mod_base = OTHER; note = 2'-O-methyladenosine
  modified_base 16: mod_base = cm
  modified_base 17: mod_base = um
  modified_base 18: mod_base = um
  modified_base 19: mod_base = cm
  modified_base 20: mod_base = OTHER; note = 2'-O-methylinosine
  modified_base 21: mod_base = OTHER; note = 2'-O-methyladenosine
  source 1..21: mol_type = other RNA
caccgacacatgcaacttcna

SEQ ID NO: 1058 - RNA, 21 nt, synthetic construct
  modified_base 1: mod_base = gm
  modified_base 2: mod_base = OTHER; note = 2'-O-methyladenosine
  modified_base 3: mod_base = cm
  modified_base 4: mod_base = cm
  modified_base 5: mod_base = cm
  modified_base 6: mod_base = um
  modified_base 7: mod_base = OTHER; note = 2'-O-methyladenosine
  modified_base 8: mod_base = gm
  modified_base 9: mod_base = OTHER; note = 2'-fluoroadenosine
  modified_base 10: mod_base = OTHER; note = 2'-fluoroadenosine
  modified_base 11: mod_base = OTHER; note = 2'-fluorocytidine
  modified_base 12: mod_base = um
  modified_base 13: mod_base = gm
  modified_base 14: mod_base = um
  modified_base 15: mod_base = cm
  modified_base 16: mod_base = um
  modified_base 17: mod_base = um
  modified_base 18: mod_base = cm
  modified_base 19: mod_base = OTHER; note = 2'-O-methylinosine
  modified_base 20: mod_base = OTHER; note = 2'-O-methyladenosine
  modified_base 21: mod_base = OTHER; note = 2'-O-methyladenosine
  source 1..21: mol_type = other RNA
gaccctagaactgtcttcnaa

SEQ ID NO: 1059 - RNA, 21 nt, synthetic construct
  modified_base 1: mod_base = gm
  modified_base 2: mod_base = OTHER; note = 2'-O-methyladenosine
  modified_base 3: mod_base = OTHER; note = 2'-O-methyladenosine
  modified_base 4: mod_base = cm
  modified_base 5: mod_base = cm
  modified_base 6: mod_base = cm
  modified_base 7: mod_base = um
  modified_base 8: mod_base = OTHER; note = 2'-O-methyladenosine
  modified_base 9: mod_base = OTHER; note = 2'-fluoroguanosine
  modified_base 10: mod_base = OTHER; note = 2'-fluoroadenosine
  modified_base 11: mod_base = OTHER; note = 2'-fluoroadenosine
  modified_base 12: mod_base = cm
  modified_base 13: mod_base = um
  modified_base 14: mod_base = gm
  modified_base 15: mod_base = um
  modified_base 16: mod_base = cm
  modified_base 17: mod_base = um
  modified_base 18: mod_base = um
  modified_base 19: mod_base = cm
  modified_base 20: mod_base = OTHER; note = 2'-O-methylinosine
  modified_base 21: mod_base = OTHER; note = 2'-O-methyladenosine
  source 1..21: mol_type = other RNA
gaaccctagaactgtcttcna

SEQ ID NO: 1060 - RNA, 21 nt, synthetic construct
  modified_base 1: mod_base = um
  modified_base 2: mod_base = gm
  modified_base 3: mod_base = gm
  modified_base 4: mod_base = cm
  modified_base 5: mod_base = OTHER; note = 2'-O-methyladenosine
  modified_base 6: mod_base = OTHER; note = 2'-O-methyladenosine
  modified_base 7: mod_base = gm
  modified_base 8: mod_base = OTHER; note = 2'-O-methyladenosine
  modified_base 9: mod_base = OTHER; note = 2'-fluorouridine
  modified_base 10: mod_base = cm
  modified_base 11: mod_base = OTHER; note = 2'-fluoroguanosine
  modified_base 12: mod_base = OTHER; note = 2'-fluorouridine
  modified_base 13: mod_base = cm
  modified_base 14: mod_base = cm
  modified_base 15: mod_base = OTHER; note = 2'-O-methyladenosine
  modified_base 16: mod_base = cm
  modified_base 17: mod_base = um
  modified_base 18: mod_base = OTHER; note = 2'-O-methyladenosine
  modified_base 19: mod_base = cm
  modified_base 20: mod_base = OTHER; note = 2'-O-methyladenosine
  modified_base 21: mod_base = OTHER; note = 2'-O-methyladenosine
  source 1..21: mol_type = other RNA
tggcaagatcgtccactacaa

SEQ ID NO: 1061 - RNA, 21 nt, synthetic construct
  modified_base 1: mod_base = um
  modified_base 2: mod_base = gm
  modified_base 3: mod_base = gm
  modified_base 4: mod_base = cm
  modified_base 5: mod_base = OTHER; note = 2'-O-methyladenosine
  modified_base 6: mod_base = OTHER; note = 2'-O-methyladenosine
  modified_base 7: mod_base = gm
  modified_base 8: mod_base = OTHER; note = 2'-O-methyladenosine
  modified_base 9: mod_base = OTHER; note = 2'-fluorouridine
  modified_base 10: mod_base = cm
  modified_base 11: mod_base = OTHER; note = 2'-fluoroguanosine
  modified_base 12: mod_base = um
  modified_base 13: mod_base = OTHER; note = 2'-fluorocytidine
  modified_base 14: mod_base = cm
  modified_base 15: mod_base = OTHER; note = 2'-O-methyladenosine
  modified_base 16: mod_base = cm
  modified_base 17: mod_base = um
  modified_base 18: mod_base = OTHER; note = 2'-O-methyladenosine
  modified_base 19: mod_base = cm
  modified_base 20: mod_base = OTHER; note = 2'-O-methyladenosine
  modified_base 21: mod_base = OTHER; note = 2'-O-methyladenosine
  source 1..21: mol_type = other RNA
tggcaagatcgtccactacaa

SEQ ID NO: 1062 - RNA, 21 nt, synthetic construct
  modified_base 1: mod_base = cm
  modified_base 2: mod_base = cm
  modified_base 3: mod_base = um
  modified_base 4: mod_base = gm
  modified_base 5: mod_base = gm
  modified_base 6: mod_base = um
  modified_base 7: mod_base = cm
  modified_base 8: mod_base = OTHER; note = 2'-O-methyladenosine
  modified_base 9: mod_base = OTHER; note = 2'-fluorouridine
  modified_base 10: mod_base = gm
  modified_base 11: mod_base = OTHER; note = 2'-fluoroguanosine
  modified_base 12: mod_base = OTHER; note = 2'-fluoroadenosine
  modified_base 13: mod_base = gm
  modified_base 14: mod_base = um
  modified_base 15: mod_base = OTHER; note = 2'-O-methyladenosine
  modified_base 16: mod_base = um
  modified_base 17: mod_base = um
  modified_base 18: mod_base = OTHER; note = 2'-O-methyladenosine
  modified_base 19: mod_base = cm
  modified_base 20: mod_base = gm
  modified_base 21: mod_base = OTHER; note = 2'-O-methyladenosine
  source 1..21: mol_type = other RNA
cctggtcatggagtattacga

SEQ ID NO: 1063 - RNA, 19 nt, synthetic construct
  modified_base 1: mod_base = cm
  modified_base 1^2: mod_base = OTHER; note = phosphorothioate linkage
  modified_base 2: mod_base = cm
  modified_base 2^3: mod_base = OTHER; note = phosphorothioate linkage
  modified_base 3: mod_base = cm
  modified_base 4: mod_base = um
  modified_base 5: mod_base = OTHER; note = 2'-O-methyladenosine
  modified_base 6: mod_base = gm
  modified_base 7: mod_base = OTHER; note = 2'-fluoroadenosine
  modified_base 8: mod_base = OTHER; note = 2'-fluoroadenosine
  modified_base 9: mod_base = OTHER; note = 2'-fluorocytidine
  modified_base 10: mod_base = um
  modified_base 11: mod_base = gm
  modified_base 12: mod_base = um
  modified_base 13: mod_base = cm
  modified_base 14: mod_base = um
  modified_base 15: mod_base = um
  modified_base 16: mod_base = cm
  modified_base 17: mod_base = gm
  modified_base 17^18: mod_base = OTHER; note = phosphorothioate linkage
  modified_base 18: mod_base = OTHER; note = 2'-O-methyladenosine
  modified_base 18^19: mod_base = OTHER; note = phosphorothioate linkage
  modified_base 19: mod_base = OTHER; note = 2'-O-methyladenosine
  source 1..19: mol_type = other RNA
ccctagaactgtcttcgaa

SEQ ID NO: 1064 - RNA, 21 nt, synthetic construct
  modified_base 1: mod_base = cm
  modified_base 2: mod_base = cm
  modified_base 3: mod_base = um
  modified_base 4: mod_base = cm
  modified_base 5: mod_base = gm
  modified_base 6: mod_base = gm
  modified_base 7: mod_base = um
  modified_base 8: mod_base = OTHER; note = 2'-O-methyladenosine
  modified_base 9: mod_base = OTHER; note = 2'-fluorouridine
  modified_base 10: mod_base = um
  modified_base 11: mod_base = OTHER; note = 2'-fluorouridine
  modified_base 12: mod_base = OTHER; note = 2'-O-methyladenosine
  modified_base 13: mod_base = OTHER; note = 2'-fluorouridine
  modified_base 14: mod_base = um
  modified_base 15: mod_base = gm
  modified_base 16: mod_base = um
  modified_base 17: mod_base = cm
  modified_base 18: mod_base = um
  modified_base 19: mod_base = gm
  modified_base 20: mod_base = um
  modified_base 21: mod_base = OTHER; note = 2'-O-methyladenosine
  source 1..21: mol_type = other RNA
cctcggtatttattgtctgta

SEQ ID NO: 1065 - RNA, 21 nt, synthetic construct
  modified_base 1: mod_base = cm
  modified_base 2: mod_base = cm
  modified_base 3: mod_base = um
  modified_base 4: mod_base = cm
  modified_base 5: mod_base = gm
  modified_base 6: mod_base = gm
  modified_base 7: mod_base = um
  modified_base 8: mod_base = OTHER; note = 2'-O-methyladenosine
  modified_base 9: mod_base = OTHER; note = 2'-fluorouridine
  modified_base 10: mod_base = um
  modified_base 11: mod_base = OTHER; note = 2'-fluorouridine
  modified_base 12: mod_base = OTHER; note = 2'-fluoroadenosine
  modified_base 13: mod_base = um
  modified_base 14: mod_base = um
  modified_base 15: mod_base = gm
  modified_base 16: mod_base = um
  modified_base 17: mod_base = cm
  modified_base 18: mod_base = um
  modified_base 19: mod_base = gm
  modified_base 20: mod_base = um
  modified_base 21: mod_base = OTHER; note = 2'-O-methyladenosine
  source 1..21: mol_type = other RNA
cctcggtatttattgtctgta

SEQ ID NO: 1066 - RNA, 21 nt, synthetic construct
  modified_base 1: mod_base = um
  modified_base 2: mod_base = um
  modified_base 3: mod_base = cm
  modified_base 4: mod_base = cm
  modified_base 5: mod_base = um
  modified_base 6: mod_base = cm
  modified_base 7: mod_base = gm
  modified_base 8: mod_base = gm
  modified_base 9: mod_base = OTHER; note = 2'-fluorouridine
  modified_base 10: mod_base = OTHER; note = 2'-O-methyladenosine
  modified_base 11: mod_base = OTHER; note = 2'-fluorouridine
  modified_base 12: mod_base = OTHER; note = 2'-fluorouridine
  modified_base 13: mod_base = um
  modified_base 14: mod_base = OTHER; note = 2'-O-methyladenosine
  modified_base 15: mod_base = um
  modified_base 16: mod_base = um
  modified_base 17: mod_base = gm
  modified_base 18: mod_base = um
  modified_base 19: mod_base = cm
  modified_base 20: mod_base = um
  modified_base 21: mod_base = OTHER; note = 2'-O-methyladenosine
  source 1..21: mol_type = other RNA
ttcctcggtatttattgtcta

SEQ ID NO: 1067 - RNA, 21 nt, synthetic construct
  modified_base 1: mod_base = cm
  modified_base 2: mod_base = cm
  modified_base 3: mod_base = um
  modified_base 4: mod_base = gm
  modified_base 5: mod_base = gm
  modified_base 6: mod_base = um
  modified_base 7: mod_base = cm
  modified_base 8: mod_base = OTHER; note = 2'-O-methyladenosine
  modified_base 9: mod_base = OTHER; note = 2'-fluorouridine
  modified_base 10: mod_base = gm
  modified_base 11: mod_base = OTHER; note = 2'-fluoroguanosine
  modified_base 12: mod_base = OTHER; note = 2'-fluoroadenosine
  modified_base 13: mod_base = gm
  modified_base 14: mod_base = um
  modified_base 15: mod_base = OTHER; note = 2'-O-methyladenosine
  modified_base 16: mod_base = um
  modified_base 17: mod_base = um
  modified_base 18: mod_base = OTHER; note = 2'-O-methyladenosine
  modified_base 19: mod_base = cm
  modified_base 20: mod_base = gm
  modified_base 21: mod_base = OTHER; note = 2'-O-methyladenosine
  source 1..21: mol_type = other RNA
cctggtcatggagtattacga

SEQ ID NO: 1068 - RNA, 22 nt, synthetic construct
  modified_base 1: mod_base = um
  modified_base 2: mod_base = um
  modified_base 3: mod_base = cm
  modified_base 4: mod_base = cm
  modified_base 5: mod_base = um
  modified_base 6: mod_base = cm
  modified_base 7: mod_base = gm
  modified_base 8: mod_base = gm
  modified_base 9: mod_base = OTHER; note = 2'-fluorouridine
  modified_base 10: mod_base = OTHER; note = 2'-O-methyladenosine
  modified_base 11: mod_base = OTHER; note = 2'-fluorouridine
  modified_base 12: mod_base = OTHER; note = 2'-fluorouridine
  modified_base 13: mod_base = um
  modified_base 14: mod_base = OTHER; note = 2'-O-methyladenosine
  modified_base 15: mod_base = um
  modified_base 16: mod_base = um
  modified_base 17: mod_base = gm
  modified_base 18: mod_base = um
  modified_base 19: mod_base = cm
  modified_base 20: mod_base = um
  modified_base 21: mod_base = OTHER; note = 2'-O-propargyladenosine
  source 1..22: mol_type = other RNA
ttcctcggtatttattgtctaa

SEQ ID NO: 1069 - RNA, 22 nt, synthetic construct
  modified_base 1: mod_base = um
  modified_base 2: mod_base = um
  modified_base 3: mod_base = cm
  modified_base 4: mod_base = cm
  modified_base 5: mod_base = um
  modified_base 6: mod_base = cm
  modified_base 7: mod_base = gm
  modified_base 8: mod_base = gm
  modified_base 9: mod_base = OTHER; note = 2'-fluorouridine
  modified_base 10: mod_base = OTHER; note = 2'-O-methyladenosine
  modified_base 11: mod_base = OTHER; note = 2'-fluorouridine
  modified_base 12: mod_base = OTHER; note = 2'-fluorouridine
  modified_base 13: mod_base = um
  modified_base 14: mod_base = OTHER; note = 2'-O-methyladenosine
  modified_base 15: mod_base = um
  modified_base 16: mod_base = um
  modified_base 17: mod_base = gm
  modified_base 18: mod_base = um
  modified_base 19: mod_base = cm
  modified_base 20: mod_base = um
  modified_base 20^21: mod_base = OTHER; note = phosphorothioate linkage
  modified_base 21: mod_base = OTHER; note = 2'-O-propargyladenosine
  source 1..22: mol_type = other RNA
ttcctcggtatttattgtctaa

SEQ ID NO: 1070 - RNA, 21 nt, synthetic construct
  modified_base 1: mod_base = um
  modified_base 2: mod_base = um
  modified_base 3: mod_base = cm
  modified_base 4: mod_base = cm
  modified_base 5: mod_base = um
  modified_base 6: mod_base = cm
  modified_base 7: mod_base = gm
  modified_base 8: mod_base = gm
  modified_base 9: mod_base = OTHER; note = 2'-fluorouridine
  modified_base 10: mod_base = OTHER; note = 2'-O-methyladenosine
  modified_base 11: mod_base = OTHER; note = 2'-fluorouridine
  modified_base 12: mod_base = OTHER; note = 2'-fluorouridine
  modified_base 13: mod_base = um
  modified_base 14: mod_base = OTHER; note = 2'-O-methyladenosine
  modified_base 15: mod_base = um
  modified_base 16: mod_base = um
  modified_base 17: mod_base = gm
  modified_base 18: mod_base = um
  modified_base 19: mod_base = cm
  modified_base 20: mod_base = um
  modified_base 21: mod_base = OTHER; note = 2'-O-methyladenosine
  source 1..21: mol_type = other RNA
ttcctcggtatttattgtcta

SEQ ID NO: 1071 - RNA, 21 nt, synthetic construct
  modified_base 1: mod_base = cm
  modified_base 2: mod_base = cm
  modified_base 3: mod_base = um
  modified_base 4: mod_base = gm
  modified_base 5: mod_base = gm
  modified_base 6: mod_base = um
  modified_base 7: mod_base = cm
  modified_base 8: mod_base = OTHER; note = 2'-O-methyladenosine
  modified_base 9: mod_base = OTHER; note = 2'-fluorouridine
  modified_base 10: mod_base = gm
  modified_base 11: mod_base = OTHER; note = 2'-fluoroguanosine
  modified_base 12: mod_base = OTHER; note = 2'-fluoroadenosine
  modified_base 13: mod_base = gm
  modified_base 14: mod_base = um
  modified_base 15: mod_base = OTHER; note = 2'-O-methyladenosine
  modified_base 16: mod_base = um
  modified_base 17: mod_base = um
  modified_base 18: mod_base = OTHER; note = 2'-O-methyladenosine
  modified_base 19: mod_base = cm
  modified_base 20: mod_base = gm
  modified_base 21: mod_base = OTHER; note = 2'-O-methyladenosine
  source 1..21: mol_type = other RNA
cctggtcatggagtattacga

SEQ ID NO: 1072 - RNA, 22 nt, synthetic construct
  modified_base 1: mod_base = cm
  modified_base 2: mod_base = cm
  modified_base 3: mod_base = um
  modified_base 4: mod_base = gm
  modified_base 5: mod_base = gm
  modified_base 6: mod_base = gm
  modified_base 7: mod_base = um
  modified_base 8: mod_base = cm
  modified_base 9: mod_base = OTHER; note = 2'-O-methyladenosine
  modified_base 10: mod_base = OTHER; note = 2'-fluorouridine
  modified_base 11: mod_base = gm
  modified_base 12: mod_base = OTHER; note = 2'-fluoroguanosine
  modified_base 13: mod_base = OTHER; note = 2'-fluoroadenosine
  modified_base 14: mod_base = gm
  modified_base 15: mod_base = um
  modified_base 16: mod_base = OTHER; note = 2'-O-methyladenosine
  modified_base 17: mod_base = um
  modified_base 18: mod_base = um
  modified_base 19: mod_base = OTHER; note = 2'-O-methyladenosine
  modified_base 20: mod_base = cm
  modified_base 21: mod_base = gm
  modified_base 22: mod_base = OTHER; note = 2'-O-methyladenosine
  source 1..22: mol_type = other RNA
cctgggtcatggagtattacga

SEQ ID NO: 1073 - RNA, 21 nt, synthetic construct
  modified_base 1: mod_base = cm
  modified_base 2: mod_base = cm
  modified_base 3: mod_base = um
  modified_base 4: mod_base = gm
  modified_base 5: mod_base = gm
  modified_base 6: mod_base = um
  modified_base 7: mod_base = cm
  modified_base 8: mod_base = OTHER; note = 2'-O-methyladenosine
  modified_base 9: mod_base = OTHER; note = 2'-fluorouridine
  modified_base 10: mod_base = gm
  modified_base 11: mod_base = OTHER; note = 2'-fluoroguanosine
  modified_base 12: mod_base = OTHER; note = 2'-fluoroadenosine
  modified_base 13: mod_base = gm
  modified_base 14: mod_base = um
  modified_base 15: mod_base = OTHER; note = 2'-O-methyladenosine
  modified_base 16: mod_base = um
  modified_base 17: mod_base = um
  modified_base 18: mod_base = OTHER; note = 2'-O-methyladenosine
  modified_base 19: mod_base = cm
  modified_base 20: mod_base = gm
  modified_base 21: mod_base = OTHER; note = 2'-O-methyladenosine
  source 1..21: mol_type = other RNA
cctggtcatggagtattacga

SEQ ID NO: 1074 - RNA, 20 nt, synthetic construct
  modified_base 1: mod_base = cm
  modified_base 2: mod_base = um
  modified_base 3: mod_base = gm
  modified_base 4: mod_base = gm
  modified_base 5: mod_base = um
  modified_base 6: mod_base = cm
  modified_base 7: mod_base = OTHER; note = 2'-O-methyladenosine
  modified_base 8: mod_base = OTHER; note = 2'-fluorouridine
  modified_base 9: mod_base = gm
  modified_base 10: mod_base = OTHER; note = 2'-fluoroguanosine
  modified_base 11: mod_base = OTHER; note = 2'-fluoroadenosine
  modified_base 12: mod_base = gm
  modified_base 13: mod_base = um
  modified_base 14: mod_base = OTHER; note = 2'-O-methyladenosine
  modified_base 15: mod_base = um
  modified_base 16: mod_base = um
  modified_base 17: mod_base = OTHER; note = 2'-O-methyladenosine
  modified_base 18: mod_base = cm
  modified_base 19: mod_base = gm
  modified_base 20: mod_base = OTHER; note = 2'-O-methyladenosine
  source 1..20: mol_type = other RNA
ctggtcatggagtattacga

SEQ ID NO: 1075 - RNA, 21 nt, synthetic construct
  modified_base 1: mod_base = cm
  modified_base 1^2: mod_base = OTHER; note = phosphorothioate linkage
  modified_base 2: mod_base = cm
  modified_base 3: mod_base = um
  modified_base 4: mod_base = gm
  modified_base 5: mod_base = gm
  modified_base 6: mod_base = um
  modified_base 7: mod_base = cm
  modified_base 8: mod_base = OTHER; note = 2'-O-methyladenosine
  modified_base 9: mod_base = OTHER; note = 2'-fluorouridine
  modified_base 10: mod_base = gm
  modified_base 11: mod_base = OTHER; note = 2'-fluoroguanosine
  modified_base 12: mod_base = OTHER; note = 2'-fluoroadenosine
  modified_base 13: mod_base = gm
  modified_base 14: mod_base = um
  modified_base 15: mod_base = OTHER; note = 2'-O-methyladenosine
  modified_base 16: mod_base = um
  modified_base 17: mod_base = um
  modified_base 18: mod_base = OTHER; note = 2'-O-methyladenosine
  modified_base 19: mod_base = cm
  modified_base 20: mod_base = gm
  modified_base 21: mod_base = OTHER; note = 2'-O-methyladenosine
  source 1..21: mol_type = other RNA
cctggtcatggagtattacga

SEQ ID NO: 1076 - RNA, 21 nt, synthetic construct
  modified_base 1: mod_base = gm
  modified_base 2: mod_base = gm
  modified_base 3: mod_base = OTHER; note = 2'-O-methyladenosine
  modified_base 4: mod_base = um
  modified_base 5: mod_base = gm
  modified_base 6: mod_base = OTHER; note = 2'-O-methyladenosine
  modified_base 7: mod_base = OTHER; note = 2'-O-methyladenosine
  modified_base 8: mod_base = OTHER; note = 2'-O-methyladenosine
  modified_base 9: mod_base = OTHER; note = 2'-fluorocytidine
  modified_base 10: mod_base = OTHER; note = 2'-fluoroadenosine
  modified_base 11: mod_base = OTHER; note = 2'-fluoroguanosine
  modified_base 12: mod_base = cm
  modified_base 13: mod_base = um
  modified_base 14: mod_base = gm
  modified_base 15: mod_base = OTHER; note = 2'-O-methyladenosine
  modified_base 16: mod_base = OTHER; note = 2'-O-methyladenosine
  modified_base 17: mod_base = gm
  modified_base 18: mod_base = um
  modified_base 19: mod_base = OTHER; note = 2'-O-methylinosine
  modified_base 20: mod_base = gm
  modified_base 21: mod_base = OTHER; note = 2'-O-methyladenosine
  source 1..21: mol_type = other RNA
ggatgaaacagctgaagtnga

SEQ ID NO: 1077 - RNA, 21 nt, synthetic construct
  modified_base 1: mod_base = um
  modified_base 2: mod_base = cm
  modified_base 3: mod_base = cm
  modified_base 4: mod_base = cm
  modified_base 5: mod_base = um
  modified_base 6: mod_base = gm
  modified_base 7: mod_base = OTHER; note = 2'-O-methyladenosine
  modified_base 8: mod_base = OTHER; note = 2'-O-methyladenosine
  modified_base 9: mod_base = OTHER; note = 2'-fluorocytidine
  modified_base 10: mod_base = OTHER; note = 2'-fluorocytidine
  modified_base 11: mod_base = OTHER; note = 2'-fluorocytidine
  modified_base 12: mod_base = um
  modified_base 13: mod_base = OTHER; note = 2'-O-methyladenosine
  modified_base 14: mod_base = gm
  modified_base 15: mod_base = OTHER; note = 2'-O-methyladenosine
  modified_base 16: mod_base = OTHER; note = 2'-O-methyladenosine
  modified_base 17: mod_base = cm
  modified_base 18: mod_base = um
  modified_base 19: mod_base = gm
  modified_base 20: mod_base = um
  modified_base 21: mod_base = OTHER; note = 2'-O-methyladenosine
  source 1..21: mol_type = other RNA
tccctgaaccctagaactgta

SEQ ID NO: 1078 - RNA, 21 nt, synthetic construct
  modified_base 1: mod_base = gm
  modified_base 2: mod_base = OTHER; note = 2'-O-methyladenosine
  modified_base 3: mod_base = OTHER; note = 2'-O-methyladenosine
  modified_base 4: mod_base = cm
  modified_base 5: mod_base = cm
  modified_base 6: mod_base = cm
  modified_base 7: mod_base = um
  modified_base 8: mod_base = OTHER; note = 2'-O-methyladenosine
  modified_base 9: mod_base = OTHER; note = 2'-fluoroguanosine
  modified_base 10: mod_base = OTHER; note = 2'-fluoroadenosine
  modified_base 11: mod_base = OTHER; note = 2'-fluoroadenosine
  modified_base 12: mod_base = cm
  modified_base 13: mod_base = um
  modified_base 14: mod_base = gm
  modified_base 15: mod_base = um
  modified_base 16: mod_base = cm
  modified_base 17: mod_base = um
  modified_base 18: mod_base = um
  modified_base 19: mod_base = cm
  modified_base 20: mod_base = OTHER; note = 2'-O-methylinosine
  modified_base 21: mod_base = OTHER; note = 2'-O-methyladenosine
  source 1..21: mol_type = other RNA
gaaccctagaactgtcttcna

SEQ ID NO: 1079 - RNA, 21 nt, synthetic construct
  modified_base 1: mod_base = gm
  modified_base 2: mod_base = OTHER; note = 2'-O-methyladenosine
  modified_base 3: mod_base = cm
  modified_base 4: mod_base = cm
  modified_base 5: mod_base = cm
  modified_base 6: mod_base = um
  modified_base 7: mod_base = OTHER; note = 2'-O-methyladenosine
  modified_base 8: mod_base = gm
  modified_base 9: mod_base = OTHER; note = 2'-fluoroadenosine
  modified_base 10: mod_base = OTHER; note = 2'-fluoroadenosine
  modified_base 11: mod_base = OTHER; note = 2'-fluorocytidine
  modified_base 12: mod_base = um
  modified_base 13: mod_base = gm
  modified_base 14: mod_base = um
  modified_base 15: mod_base = cm
  modified_base 16: mod_base = um
  modified_base 17: mod_base = um
  modified_base 18: mod_base = cm
  modified_base 19: mod_base = OTHER; note = 2'-O-methylinosine
  modified_base 20: mod_base = OTHER; note = 2'-O-methyladenosine
  modified_base 21: mod_base = OTHER; note = 2'-O-methyladenosine
  source 1..21: mol_type = other RNA
gaccctagaactgtcttcnaa

SEQ ID NO: 1080 - RNA, 21 nt, synthetic construct
  modified_base 1: mod_base = OTHER; note = 2'-O-methyladenosine
  modified_base 2: mod_base = cm
  modified_base 3: mod_base = cm
  modified_base 4: mod_base = cm
  modified_base 5: mod_base = um
  modified_base 6: mod_base = OTHER; note = 2'-O-methyladenosine
  modified_base 7: mod_base = gm
  modified_base 8: mod_base = OTHER; note = 2'-O-methyladenosine
  modified_base 9: mod_base = OTHER; note = 2'-fluoroadenosine
  modified_base 10: mod_base = OTHER; note = 2'-fluorocytidine
  modified_base 11: mod_base = OTHER; note = 2'-fluorouridine
  modified_base 12: mod_base = gm
  modified_base 13: mod_base = um
  modified_base 14: mod_base = cm
  modified_base 15: mod_base = um
  modified_base 16: mod_base = um
  modified_base 17: mod_base = cm
  modified_base 18: mod_base = OTHER; note = 2'-O-methylinosine
  modified_base 19: mod_base = OTHER; note = 2'-O-methyladenosine
  modified_base 20: mod_base = cm
  modified_base 21: mod_base = um
  source 1..21: mol_type = other RNA
accctagaactgtcttcnact

SEQ ID NO: 1081 - RNA, 21 nt, synthetic construct
  modified_base 1: mod_base = cm
  modified_base 2: mod_base = cm
  modified_base 3: mod_base = cm
  modified_base 4: mod_base = um
  modified_base 5: mod_base = OTHER; note = 2'-O-methyladenosine
  modified_base 6: mod_base = gm
  modified_base 7: mod_base = OTHER; note = 2'-O-methyladenosine
  modified_base 8: mod_base = OTHER; note = 2'-O-methyladenosine
  modified_base 9: mod_base = OTHER; note = 2'-fluorocytidine
  modified_base 10: mod_base = OTHER; note = 2'-fluorouridine
  modified_base 11: mod_base = OTHER; note = 2'-fluoroguanosine
  modified_base 12: mod_base = um
  modified_base 13: mod_base = cm
  modified_base 14: mod_base = um
  modified_base 15: mod_base = um
  modified_base 16: mod_base = cm
  modified_base 17: mod_base = OTHER; note = 2'-O-methylinosine
  modified_base 18: mod_base = OTHER; note = 2'-O-methyladenosine
  modified_base 19: mod_base = cm
  modified_base 20: mod_base = um
  modified_base 21: mod_base = OTHER; note = 2'-O-methyladenosine
  source 1..21: mol_type = other RNA
ccctagaactgtcttcnacta

SEQ ID NO: 1082 - RNA, 21 nt, synthetic construct
  modified_base 1: mod_base = um
  modified_base 2: mod_base = gm
  modified_base 3: mod_base = cm
  modified_base 4: mod_base = um
  modified_base 5: mod_base = um
  modified_base 6: mod_base = OTHER; note = 2'-O-methyladenosine
  modified_base 7: mod_base = cm
  modified_base 8: mod_base = um
  modified_base 9: mod_base = OTHER; note = 2'-fluorocytidine
  modified_base 10: mod_base = OTHER; note = 2'-fluoroguanosine
  modified_base 11: mod_base = OTHER; note = 2'-fluoroguanosine
  modified_base 12: mod_base = gm
  modified_base 13: mod_base = OTHER; note = 2'-O-methyladenosine
  modified_base 14: mod_base = OTHER; note = 2'-O-methyladenosine
  modified_base 15: mod_base = OTHER; note = 2'-O-methyladenosine
  modified_base 16: mod_base = um
  modified_base 17: mod_base = um
  modified_base 18: mod_base = um
  modified_base 19: mod_base = gm
  modified_base 20: mod_base = cm
  modified_base 21: mod_base = um
  source 1..21: mol_type = other RNA
tgcttactcgggaaatttgct

SEQ ID NO: 1083 - RNA, 21 nt, synthetic construct
  modified_base 1: mod_base = cm
  modified_base 2: mod_base = gm
  modified_base 3: mod_base = gm
  modified_base 4: mod_base = gm
  modified_base 5: mod_base = OTHER; note = 2'-O-methyladenosine
  modified_base 6: mod_base = OTHER; note = 2'-O-methyladenosine
  modified_base 7: mod_base = OTHER; note = 2'-O-methyladenosine
  modified_base 8: mod_base = um
  modified_base 9: mod_base = OTHER; note = 2'-fluorouridine
  modified_base 10: mod_base = OTHER; note = 2'-fluorouridine
  modified_base 11: mod_base = OTHER; note = 2'-fluoroguanosine
  modified_base 12: mod_base = cm
  modified_base 13: mod_base = um
  modified_base 14: mod_base = um
  modified_base 15: mod_base = um
  modified_base 16: mod_base = um
  modified_base 17: mod_base = OTHER; note = 2'-O-methylinosine
  modified_base 18: mod_base = cm
  modified_base 19: mod_base = cm
  modified_base 20: mod_base = OTHER; note = 2'-O-methyladenosine
  modified_base 21: mod_base = OTHER; note = 2'-O-methyladenosine
  source 1..21: mol_type = other RNA
cgggaaatttgcttttnccaa

SEQ ID NO: 1084 - RNA, 21 nt, synthetic construct
  modified_base 1: mod_base = OTHER; note = 2'-O-methyladenosine
  modified_base 2: mod_base = cm
  modified_base 3: mod_base = cm
  modified_base 4: mod_base = cm
  modified_base 5: mod_base = cm
  modified_base 6: mod_base = OTHER; note = 2'-O-methyladenosine
  modified_base 7: mod_base = OTHER; note = 2'-O-methyladenosine
  modified_base 8: mod_base = um
  modified_base 9: mod_base = OTHER; note = 2'-fluorocytidine
  modified_base 10: mod_base = OTHER; note = 2'-fluorocytidine
  modified_base 11: mod_base = OTHER; note = 2'-fluoroadenosine
  modified_base 12: mod_base = cm
  modified_base 13: mod_base = gm
  modified_base 14: mod_base = um
  modified_base 15: mod_base = um
  modified_base 16: mod_base = um
  modified_base 17: mod_base = um
  modified_base 18: mod_base = gm
  modified_base 19: mod_base = gm
  modified_base 20: mod_base = OTHER; note = 2'-O-methyladenosine
  modified_base 21: mod_base = um
  source 1..21: mol_type = other RNA
accccaatccacgttttggat

SEQ ID NO: 1085 - RNA, 21 nt, synthetic construct
  modified_base 1: mod_base = cm
  modified_base 2: mod_base = cm
  modified_base 3: mod_base = cm
  modified_base 4: mod_base = OTHER; note = 2'-O-methyladenosine
  modified_base 5: mod_base = OTHER; note = 2'-O-methyladenosine
  modified_base 6: mod_base = um
  modified_base 7: mod_base = cm
  modified_base 8: mod_base = cm
  modified_base 9: mod_base = OTHER; note = 2'-fluoroadenosine
  modified_base 10: mod_base = OTHER; note = 2'-fluorocytidine
  modified_base 11: mod_base = OTHER; note = 2'-fluoroguanosine
  modified_base 12: mod_base = um
  modified_base 13: mod_base = um
  modified_base 14: mod_base = um
  modified_base 15: mod_base = um
  modified_base 16: mod_base = gm
  modified_base 17: mod_base = OTHER; note = 2'-O-methylinosine
  modified_base 18: mod_base = OTHER; note = 2'-O-methyladenosine
  modified_base 19: mod_base = um
  modified_base 20: mod_base = gm
  modified_base 21: mod_base = OTHER; note = 2'-O-methyladenosine
  source 1..21: mol_type = other RNA
cccaatccacgttttgnatga

SEQ ID NO: 1086 - RNA, 21 nt, synthetic construct
  modified_base 1: mod_base = gm
  modified_base 2: mod_base = OTHER; note = 2'-O-methyladenosine
  modified_base 3: mod_base = gm
  modified_base 4: mod_base = gm
  modified_base 5: mod_base = gm
  modified_base 6: mod_base = OTHER; note = 2'-O-methyladenosine
  modified_base 7: mod_base = cm
  modified_base 8: mod_base = gm
  modified_base 9: mod_base = OTHER; note = 2'-fluorouridine
  modified_base 10: mod_base = OTHER; note = 2'-fluoroguanosine
  modified_base 11: mod_base = OTHER; note = 2'-fluorouridine
  modified_base 12: mod_base = um
  modified_base 13: mod_base = gm
  modified_base 14: mod_base = gm
  modified_base 15: mod_base = um
  modified_base 16: mod_base = OTHER; note = 2'-O-methylinosine
  modified_base 17: mod_base = OTHER; note = 2'-O-methyladenosine
  modified_base 18: mod_base = OTHER; note = 2'-O-methyladenosine
  modified_base 19: mod_base = um
  modified_base 20: mod_base = gm
  modified_base 21: mod_base = OTHER; note = 2'-O-methyladenosine
  source 1..21: mol_type = other RNA
gagggacgtgttggtnaatga

SEQ ID NO: 1087 - RNA, 21 nt, synthetic construct
  modified_base 1: mod_base = gm
  modified_base 2: mod_base = gm
  modified_base 3: mod_base = OTHER; note = 2'-O-methyladenosine
  modified_base 4: mod_base = um
  modified_base 5: mod_base = gm
  modified_base 6: mod_base = OTHER; note = 2'-O-methyladenosine
  modified_base 7: mod_base = gm
  modified_base 8: mod_base = OTHER; note = 2'-O-methyladenosine
  modified_base 9: mod_base = OTHER; note = 2'-fluoroadenosine
  modified_base 10: mod_base = OTHER; note = 2'-fluorocytidine
  modified_base 11: mod_base = OTHER; note = 2'-fluorouridine
  modified_base 12: mod_base = OTHER; note = 2'-O-methyladenosine
  modified_base 13: mod_base = cm
  modified_base 14: mod_base = cm
  modified_base 15: mod_base = um
  modified_base 16: mod_base = OTHER; note = 2'-O-methylinosine
  modified_base 17: mod_base = um
  modified_base 18: mod_base = OTHER; note = 2'-O-methyladenosine
  modified_base 19: mod_base = cm
  modified_base 20: mod_base = cm
  modified_base 21: mod_base = um
  source 1..21: mol_type = other RNA
ggatgagaactacctntacct

SEQ ID NO: 1088 - RNA, 21 nt, synthetic construct
  modified_base 1: mod_base = cm
  modified_base 2: mod_base = cm
  modified_base 3: mod_base = um
  modified_base 4: mod_base = gm
  modified_base 5: mod_base = gm
  modified_base 6: mod_base = um
  modified_base 7: mod_base = cm
  modified_base 8: mod_base = OTHER; note = 2'-O-methyladenosine
  modified_base 9: mod_base = OTHER; note = 2'-fluorouridine
  modified_base 10: mod_base = OTHER; note = 2'-fluoroguanosine
  modified_base 11: mod_base = OTHER; note = 2'-fluoroguanosine
  modified_base 12: mod_base = OTHER; note = 2'-O-methyladenosine
  modified_base 13: mod_base = gm
  modified_base 14: mod_base = um
  modified_base 15: mod_base = OTHER; note = 2'-O-methyladenosine
  modified_base 16: mod_base = um
  modified_base 17: mod_base = um
  modified_base 18: mod_base = OTHER; note = 2'-O-methyladenosine
  modified_base 19: mod_base = cm
  modified_base 20: mod_base = gm
  modified_base 21: mod_base = um
  source 1..21: mol_type = other RNA
cctggtcatggagtattacgt

SEQ ID NO: 1089 - RNA, 21 nt, synthetic construct
  modified_base 1: mod_base = gm
  modified_base 2: mod_base = gm
  modified_base 3: mod_base = OTHER; note = 2'-O-methyladenosine
  modified_base 4: mod_base = cm
  modified_base 5: mod_base = OTHER; note = 2'-O-methyladenosine
  modified_base 6: mod_base = um
  modified_base 7: mod_base = cm
  modified_base 8: mod_base = OTHER; note = 2'-O-methyladenosine
  modified_base 9: mod_base = OTHER; note = 2'-fluoroadenosine
  modified_base 10: mod_base = OTHER; note = 2'-fluoroadenosine
  modified_base 11: mod_base = OTHER; note = 2'-fluorocytidine
  modified_base 12: mod_base = cm
  modified_base 13: mod_base = cm
  modified_base 14: mod_base = gm
  modified_base 15: mod_base = OTHER; note = 2'-O-methyladenosine
  modified_base 16: mod_base = cm
  modified_base 17: mod_base = OTHER; note = 2'-O-methyladenosine
  modified_base 18: mod_base = OTHER; note = 2'-O-methyladenosine
  modified_base 19: mod_base = cm
  modified_base 20: mod_base = OTHER; note = 2'-O-methyladenosine
  modified_base 21: mod_base = um
  source 1..21: mol_type = other RNA
ggacatcaaacccgacaacat

SEQ ID NO: 1090 - RNA, 21 nt, synthetic construct
  modified_base 1: mod_base = um
  modified_base 2: mod_base = gm
  modified_base 3: mod_base = gm
  modified_base 4: mod_base = cm
  modified_base 5: mod_base = OTHER; note = 2'-O-methyladenosine
  modified_base 6: mod_base = OTHER; note = 2'-O-methyladenosine
  modified_base 7: mod_base = gm
  modified_base 8: mod_base = OTHER; note = 2'-O-methyladenosine
  modified_base 9: mod_base = OTHER; note = 2'-fluorouridine
  modified_base 10: mod_base = OTHER; note = 2'-fluorocytidine
  modified_base 11: mod_base = OTHER; note = 2'-fluoroguanosine
  modified_base 12: mod_base = um
  modified_base 13: mod_base = cm
  modified_base 14: mod_base = cm
  modified_base 15: mod_base = OTHER; note = 2'-O-methyladenosine
  modified_base 16: mod_base = cm
  modified_base 17: mod_base = um
  modified_base 18: mod_base = OTHER; note = 2'-O-methyladenosine
  modified_base 19: mod_base = cm
  modified_base 20: mod_base = OTHER; note = 2'-O-methyladenosine
  modified_base 21: mod_base = OTHER; note = 2'-O-methyladenosine
  source 1..21: mol_type = other RNA
tggcaagatcgtccactacaa

SEQ ID NO: 1091 - RNA, 21 nt, synthetic construct
  modified_base 1: mod_base = cm
  modified_base 2: mod_base = cm
  modified_base 3: mod_base = cm
  modified_base 4: mod_base = cm
  modified_base 5: mod_base = um
  modified_base 6: mod_base = um
  modified_base 7: mod_base = um
  modified_base 8: mod_base = OTHER; note = 2'-O-methyladenosine
  modified_base 9: mod_base = OTHER; note = 2'-fluorocytidine
  modified_base 10: mod_base = OTHER; note = 2'-fluoroadenosine
  modified_base 11: mod_base = OTHER; note = 2'-fluorocytidine
  modified_base 12: mod_base = cm
  modified_base 13: mod_base = gm
  modified_base 14: mod_base = gm
  modified_base 15: mod_base = OTHER; note = 2'-O-methyladenosine
  modified_base 16: mod_base = um
  modified_base 17: mod_base = um
  modified_base 18: mod_base = um
  modified_base 19: mod_base = cm
  modified_base 20: mod_base = gm
  modified_base 21: mod_base = OTHER; note = 2'-O-methyladenosine
  source 1..21: mol_type = other RNA
cccctttacaccggatttcga

SEQ ID NO: 1092 - RNA, 21 nt, synthetic construct
  modified_base 1: mod_base = cm
  modified_base 2: mod_base = gm
  modified_base 3: mod_base = OTHER; note = 2'-O-methyladenosine
  modified_base 4: mod_base = cm
  modified_base 5: mod_base = OTHER; note = 2'-O-methyladenosine
  modified_base 6: mod_base = cm
  modified_base 7: mod_base = OTHER; note = 2'-O-methyladenosine
  modified_base 8: mod_base = um
  modified_base 9: mod_base = OTHER; note = 2'-fluoroguanosine
  modified_base 10: mod_base = OTHER; note = 2'-fluorocytidine
  modified_base 11: mod_base = OTHER; note = 2'-fluoroadenosine
  modified_base 12: mod_base = OTHER; note = 2'-O-methyladenosine
  modified_base 13: mod_base = cm
  modified_base 14: mod_base = um
  modified_base 15: mod_base = um
  modified_base 16: mod_base = cm
  modified_base 17: mod_base = OTHER; note = 2'-O-methylinosine
  modified_base 18: mod_base = OTHER; note = 2'-O-methyladenosine
  modified_base 19: mod_base = cm
  modified_base 20: mod_base = um
  modified_base 21: mod_base = um
  source 1..21: mol_type = other RNA
cgacacatgcaacttcnactt

SEQ ID NO: 1093 - RNA, 21 nt, synthetic construct
  modified_base 1: mod_base = gm
  modified_base 2: mod_base = gm
  modified_base 3: mod_base = OTHER; note = 2'-O-methyladenosine
  modified_base 4: mod_base = OTHER; note = 2'-O-methyladenosine
  modified_base 5: mod_base = cm
  modified_base 6: mod_base = cm
  modified_base 7: mod_base = cm
  modified_base 8: mod_base = um
  modified_base 9: mod_base = OTHER; note = 2'-fluoroadenosine
  modified_base 10: mod_base = OTHER; note = 2'-fluoroguanosine
  modified_base 11: mod_base = OTHER; note = 2'-fluoroadenosine
  modified_base 12: mod_base = OTHER; note = 2'-O-methyladenosine
  modified_base 13: mod_base = cm
  modified_base 14: mod_base = um
  modified_base 15: mod_base = gm
  modified_base 16: mod_base = um
  modified_base 17: mod_base = cm
  modified_base 18: mod_base = um
  modified_base 19: mod_base = um
  modified_base 20: mod_base = cm
  modified_base 21: mod_base = OTHER; note = 2'-O-methyladenosine
  source 1..21: mol_type = other RNA
ggaaccctagaactgtcttca

SEQ ID NO: 1094 - RNA, 21 nt, synthetic construct
  modified_base 1: mod_base = gm
  modified_base 2: mod_base = gm
  modified_base 3: mod_base = OTHER; note = 2'-O-methyladenosine
  modified_base 4: mod_base = OTHER; note = 2'-O-methyladenosine
  modified_base 5: mod_base = cm
  modified_base 6: mod_base = cm
  modified_base 7: mod_base = cm
  modified_base 8: mod_base = um
  modified_base 9: mod_base = OTHER; note = 2'-fluoroadenosine
  modified_base 10: mod_base = OTHER; note = 2'-fluoroguanosine
  modified_base 11: mod_base = OTHER; note = 2'-fluoroadenosine
  modified_base 12: mod_base = OTHER; note = 2'-O-methyladenosine
  modified_base 13: mod_base = cm
  modified_base 14: mod_base = um
  modified_base 15: mod_base = gm
  modified_base 16: mod_base = um
  modified_base 17: mod_base = um
  modified_base 18: mod_base = um
  modified_base 19: mod_base = um
  modified_base 20: mod_base = cm
  modified_base 21: mod_base = OTHER; note = 2'-O-methyladenosine
  source 1..21: mol_type = other RNA
ggaaccctagaactgttttca

SEQ ID NO: 1095 - RNA, 21 nt, synthetic construct
  modified_base 1: mod_base = cm
  modified_base 2: mod_base = um
  modified_base 3: mod_base = gm
  modified_base 4: mod_base = cm
  modified_base 5: mod_base = um
  modified_base 6: mod_base = um
  modified_base 7: mod_base = OTHER; note = 2'-O-methyladenosine
  modified_base 8: mod_base = cm
  modified_base 9: mod_base = OTHER; note = 2'-fluorouridine
  modified_base 10: mod_base = OTHER; note = 2'-fluorocytidine
  modified_base 11: mod_base = OTHER; note = 2'-fluoroguanosine
  modified_base 12: mod_base = gm
  modified_base 13: mod_base = gm
  modified_base 14: mod_base = OTHER; note = 2'-O-methyladenosine
  modified_base 15: mod_base = OTHER; note = 2'-O-methyladenosine
  modified_base 16: mod_base = OTHER; note = 2'-O-methyladenosine
  modified_base 17: mod_base = um
  modified_base 18: mod_base = um
  modified_base 19: mod_base = um
  modified_base 20: mod_base = gm
  modified_base 21: mod_base = OTHER; note = 2'-O-methyladenosine
  source 1..21: mol_type = other RNA
ctgcttactcgggaaatttga

SEQ ID NO: 1096 - RNA, 21 nt, synthetic construct
  modified_base 1: mod_base = gm
  modified_base 2: mod_base = cm
  modified_base 3: mod_base = gm
  modified_base 4: mod_base = gm
  modified_base 5: mod_base = um
  modified_base 6: mod_base = um
  modified_base 7: mod_base = um
  modified_base 8: mod_base = gm
  modified_base 9: mod_base = OTHER; note = 2'-fluoroguanosine
  modified_base 10: mod_base = OTHER; note = 2'-O-methyl-2-aminoadenosine
  modified_base 11: mod_base = OTHER; note = 2'-fluorouridine
  modified_base 12: mod_base = OTHER; note = 2'-O-methyladenosine
  modified_base 13: mod_base = OTHER; note = 2'-fluorouridine
  modified_base 14: mod_base = um
  modified_base 15: mod_base = um
  modified_base 16: mod_base = OTHER; note = 2'-O-methyladenosine
  modified_base 17: mod_base = um
  modified_base 18: mod_base = um
  modified_base 19: mod_base = gm
  modified_base 20: mod_base = OTHER; note = 2'-O-methyladenosine
  modified_base 21: mod_base = OTHER; note = 2'-O-methyladenosine
  source 1..21: mol_type = other RNA
gcggtttggntatttattgaa

SEQ ID NO: 1097 - RNA, 21 nt, synthetic construct
  modified_base 1: mod_base = gm
  modified_base 2: mod_base = cm
  modified_base 3: mod_base = OTHER; note = 2'-O-methyladenosine
  modified_base 4: mod_base = um
  modified_base 5: mod_base = um
  modified_base 6: mod_base = cm
  modified_base 7: mod_base = cm
  modified_base 8: mod_base = um
  modified_base 9: mod_base = OTHER; note = 2'-fluorocytidine
  modified_base 10: mod_base = OTHER; note = 2'-fluoroguanosine
  modified_base 11: mod_base = OTHER; note = 2'-fluoroguanosine
  modified_base 12: mod_base = um
  modified_base 13: mod_base = OTHER; note = 2'-O-methyladenosine
  modified_base 14: mod_base = um
  modified_base 15: mod_base = um
  modified_base 16: mod_base = um
  modified_base 17: mod_base = OTHER; note = 2'-O-methyladenosine
  modified_base 18: mod_base = um
  modified_base 19: mod_base = um
  modified_base 20: mod_base = gm
  modified_base 21: mod_base = um
  source 1..21: mol_type = other RNA
gcattcctcggtatttattgt

SEQ ID NO: 1098 - RNA, 21 nt, synthetic construct
  modified_base 1: mod_base = gm
  modified_base 2: mod_base = cm
  modified_base 3: mod_base = OTHER; note = 2'-O-methyladenosine
  modified_base 4: mod_base = um
  modified_base 5: mod_base = um
  modified_base 6: mod_base = cm
  modified_base 7: mod_base = cm
  modified_base 8: mod_base = um
  modified_base 9: mod_base = OTHER; note = 2'-fluorocytidine
  modified_base 10: mod_base = OTHER; note = 2'-fluoroguanosine
  modified_base 11: mod_base = OTHER; note = 2'-fluoroguanosine
  modified_base 12: mod_base = um
  modified_base 13: mod_base = OTHER; note = 2'-O-methyladenosine
  modified_base 14: mod_base = um
  modified_base 15: mod_base = um
  modified_base 16: mod_base = um
  modified_base 17: mod_base = OTHER; note = 2'-O-methyl-2-aminoadenosine
  modified_base 18: mod_base = um
  modified_base 19: mod_base = um
  modified_base 20: mod_base = gm
  modified_base 21: mod_base = um
  source 1..21: mol_type = other RNA
gcattcctcggtatttnttgt

SEQ ID NO: 1099 - RNA, 21 nt, synthetic construct
  modified_base 1: mod_base = gm
  modified_base 2: mod_base = OTHER; note = 2'-O-methyladenosine
  modified_base 3: mod_base = cm
  modified_base 4: mod_base = cm
  modified_base 5: mod_base = cm
  modified_base 6: mod_base = um
  modified_base 7: mod_base = cm
  modified_base 8: mod_base = gm
  modified_base 9: mod_base = OTHER; note = 2'-fluorocytidine
  modified_base 10: mod_base = OTHER; note = 2'-fluoroguanosine
  modified_base 11: mod_base = OTHER; note = 2'-fluoroadenosine
  modified_base 12: mod_base = OTHER; note = 2'-O-methyladenosine
  modified_base 13: mod_base = um
  modified_base 14: mod_base = OTHER; note = 2'-O-methyladenosine
  modified_base 15: mod_base = OTHER; note = 2'-O-methyladenosine
  modified_base 16: mod_base = OTHER; note = 2'-O-methyladenosine
  modified_base 17: mod_base = OTHER; note = 2'-O-methyladenosine
  modified_base 18: mod_base = gm
  modified_base 19: mod_base = OTHER; note = 2'-O-methylinosine
  modified_base 20: mod_base = cm
  modified_base 21: mod_base = OTHER; note = 2'-O-methyladenosine
  source 1..21: mol_type = other RNA
gaccctcgcgaataaaagnca

SEQ ID NO: 1100 - RNA, 21 nt, synthetic construct
  modified_base 1: mod_base = OTHER; note = 2'-O-methyladenosine
  modified_base 2: mod_base = gm
  modified_base 3: mod_base = gm
  modified_base 4: mod_base = gm
  modified_base 5: mod_base = gm
  modified_base 6: mod_base = cm
  modified_base 7: mod_base = gm
  modified_base 8: mod_base = OTHER; note = 2'-O-methyladenosine
  modified_base 9: mod_base = OTHER; note = 2'-fluoroguanosine
  modified_base 10: mod_base = OTHER; note = 2'-fluoroguanosine
  modified_base 11: mod_base = OTHER; note = 2'-fluorouridine
  modified_base 12: mod_base = gm
  modified_base 13: mod_base = um
  modified_base 14: mod_base = cm
  modified_base 15: mod_base = gm
  modified_base 16: mod_base = um
  modified_base 17: mod_base = gm
  modified_base 18: mod_base = cm
  modified_base 19: mod_base = um
  modified_base 20: mod_base = um
  modified_base 21: mod_base = OTHER; note = 2'-O-methyladenosine
  source 1..21: mol_type = other RNA
aggggcgaggtgtcgtgctta

SEQ ID NO: 1101 - RNA, 21 nt, synthetic construct
  modified_base 1: mod_base = gm
  modified_base 2: mod_base = gm
  modified_base 3: mod_base = cm
  modified_base 4: mod_base = OTHER; note = 2'-O-methyladenosine
  modified_base 5: mod_base = gm
  modified_base 6: mod_base = OTHER; note = 2'-O-methyladenosine
  modified_base 7: mod_base = cm
  modified_base 8: mod_base = gm
  modified_base 9: mod_base = OTHER; note = 2'-fluorocytidine
  modified_base 10: mod_base = OTHER; note = 2'-fluorocytidine
  modified_base 11: mod_base = OTHER; note = 2'-fluorocytidine
  modified_base 12: mod_base = um
  modified_base 13: mod_base = um
  modified_base 14: mod_base = cm
  modified_base 15: mod_base = um
  modified_base 16: mod_base = OTHER; note = 2'-O-methyladenosine
  modified_base 17: mod_base = cm
  modified_base 18: mod_base = gm
  modified_base 19: mod_base = cm
  modified_base 20: mod_base = gm
  modified_base 21: mod_base = OTHER; note = 2'-O-methyladenosine
  source 1..21: mol_type = other RNA
ggcagacgcccttctacgcga

SEQ ID NO: 1102 - RNA, 21 nt, synthetic construct
  modified_base 1: mod_base = gm
  modified_base 2: mod_base = gm
  modified_base 3: mod_base = cm
  modified_base 4: mod_base = OTHER; note = 2'-O-methyladenosine
  modified_base 5: mod_base = gm
  modified_base 6: mod_base = OTHER; note = 2'-O-methyladenosine
  modified_base 7: mod_base = cm
  modified_base 8: mod_base = cm
  modified_base 9: mod_base = OTHER; note = 2'-fluorocytidine
  modified_base 10: mod_base = OTHER; note = 2'-fluorocytidine
  modified_base 11: mod_base = OTHER; note = 2'-fluorocytidine
  modified_base 12: mod_base = um
  modified_base 13: mod_base = um
  modified_base 14: mod_base = cm
  modified_base 15: mod_base = um
  modified_base 16: mod_base = OTHER; note = 2'-O-methyladenosine
  modified_base 17: mod_base = cm
  modified_base 18: mod_base = gm
  modified_base 19: mod_base = cm
  modified_base 20: mod_base = gm
  modified_base 21: mod_base = OTHER; note = 2'-O-methyladenosine
  source 1..21: mol_type = other RNA
ggcagacccccttctacgcga

SEQ ID NO: 1103 - RNA, 21 nt, synthetic construct
  modified_base 1: mod_base = cm
  modified_base 2: mod_base = cm
  modified_base 3: mod_base = cm
  modified_base 4: mod_base = cm
  modified_base 5: mod_base = gm
  modified_base 6: mod_base = OTHER; note = 2'-O-methyladenosine
  modified_base 7: mod_base = cm
  modified_base 8: mod_base = OTHER; note = 2'-O-methyladenosine
  modified_base 9: mod_base = OTHER; note = 2'-fluorouridine
  modified_base 10: mod_base = OTHER; note = 2'-fluorouridine
  modified_base 11: mod_base = OTHER; note = 2'-fluorocytidine
  modified_base 12: mod_base = cm
  modified_base 13: mod_base = um
  modified_base 14: mod_base = cm
  modified_base 15: mod_base = gm
  modified_base 16: mod_base = gm
  modified_base 17: mod_base = um
  modified_base 18: mod_base = OTHER; note = 2'-O-methyladenosine
  modified_base 19: mod_base = um
  modified_base 20: mod_base = um
  modified_base 21: mod_base = OTHER; note = 2'-O-methyladenosine
  source 1..21: mol_type = other RNA
ccccgacattcctcggtatta

SEQ ID NO: 1104 - RNA, 21 nt, synthetic construct
  modified_base 1: mod_base = um
  modified_base 2: mod_base = um
  modified_base 3: mod_base = cm
  modified_base 4: mod_base = cm
  modified_base 5: mod_base = um
  modified_base 6: mod_base = cm
  modified_base 7: mod_base = gm
  modified_base 8: mod_base = gm
  modified_base 9: mod_base = OTHER; note = 2'-fluorouridine
  modified_base 10: mod_base = OTHER; note = 2'-fluoroadenosine
  modified_base 11: mod_base = OTHER; note = 2'-fluorouridine
  modified_base 12: mod_base = um
  modified_base 13: mod_base = um
  modified_base 14: mod_base = OTHER; note = 2'-O-methyladenosine
  modified_base 15: mod_base = um
  modified_base 16: mod_base = um
  modified_base 17: mod_base = gm
  modified_base 18: mod_base = um
  modified_base 19: mod_base = cm
  modified_base 20: mod_base = um
  modified_base 21: mod_base = OTHER; note = 2'-O-methyladenosine
  source 1..21: mol_type = other RNA
ttcctcggtatttattgtcta

SEQ ID NO: 1105 - RNA, 19 nt, synthetic construct
  modified_base 1: mod_base = gm
  modified_base 2: mod_base = cm
  modified_base 3: mod_base = gm
  modified_base 4: mod_base = OTHER; note = 2'-O-methyladenosine
  modified_base 5: mod_base = gm
  modified_base 6: mod_base = gm
  modified_base 7: mod_base = OTHER; note = 2'-fluorouridine
  modified_base 8: mod_base = OTHER; note = 2'-fluoroadenosine
  modified_base 9: mod_base = OTHER; note = 2'-fluoroguanosine
  modified_base 10: mod_base = cm
  modified_base 11: mod_base = gm
  modified_base 12: mod_base = gm
  modified_base 13: mod_base = um
  modified_base 14: mod_base = OTHER; note = 2'-O-methyladenosine
  modified_base 15: mod_base = gm
  modified_base 16: mod_base = um
  modified_base 17: mod_base = gm
  modified_base 18: mod_base = OTHER; note = 2'-O-methyladenosine
  modified_base 19: mod_base = OTHER; note = 2'-O-methyladenosine
  source 1..19: mol_type = other RNA
gcgaggtagcggtagtgaa

SEQ ID NO: 1106 - RNA, 21 nt, synthetic construct
  modified_base 1: mod_base = OTHER; note = 2'-O-methyladenosine
  modified_base 2: mod_base = gm
  modified_base 3: mod_base = gm
  modified_base 4: mod_base = gm
  modified_base 5: mod_base = gm
  modified_base 6: mod_base = cm
  modified_base 7: mod_base = gm
  modified_base 8: mod_base = OTHER; note = 2'-O-methyladenosine
  modified_base 9: mod_base = OTHER; note = 2'-fluoroguanosine
  modified_base 10: mod_base = OTHER; note = 2'-fluoroguanosine
  modified_base 11: mod_base = OTHER; note = 2'-fluorouridine
  modified_base 12: mod_base = gm
  modified_base 13: mod_base = um
  modified_base 14: mod_base = cm
  modified_base 15: mod_base = gm
  modified_base 16: mod_base = um
  modified_base 17: mod_base = gm
  modified_base 18: mod_base = cm
  modified_base 19: mod_base = um
  modified_base 20: mod_base = um
  modified_base 21: mod_base = OTHER; note = 2'-O-methyladenosine
  source 1..21: mol_type = other RNA
aggggcgaggtgtcgtgctta

SEQ ID NO: 1107 - RNA, 21 nt, synthetic construct
  modified_base 1: mod_base = cm
  modified_base 2: mod_base = cm
  modified_base 3: mod_base = cm
  modified_base 4: mod_base = cm
  modified_base 5: mod_base = gm
  modified_base 6: mod_base = OTHER; note = 2'-O-methyladenosine
  modified_base 7: mod_base = cm
  modified_base 8: mod_base = OTHER; note = 2'-O-methyladenosine
  modified_base 9: mod_base = OTHER; note = 2'-fluorouridine
  modified_base 10: mod_base = OTHER; note = 2'-fluorouridine
  modified_base 11: mod_base = OTHER; note = 2'-fluorocytidine
  modified_base 12: mod_base = cm
  modified_base 13: mod_base = um
  modified_base 14: mod_base = cm
  modified_base 15: mod_base = gm
  modified_base 16: mod_base = gm
  modified_base 17: mod_base = um
  modified_base 18: mod_base = OTHER; note = 2'-O-methyladenosine
  modified_base 19: mod_base = um
  modified_base 20: mod_base = um
  modified_base 21: mod_base = OTHER; note = 2'-O-methyladenosine
  source 1..21: mol_type = other RNA
ccccgacattcctcggtatta

SEQ ID NO: 1108 - RNA, 21 nt, synthetic construct
  modified_base 1: mod_base = um
  modified_base 2: mod_base = um
  modified_base 3: mod_base = cm
  modified_base 4: mod_base = cm
  modified_base 5: mod_base = um
  modified_base 6: mod_base = cm
  modified_base 7: mod_base = gm
  modified_base 8: mod_base = gm
  modified_base 9: mod_base = OTHER; note = 2'-fluorouridine
  modified_base 10: mod_base = OTHER; note = 2'-fluoroadenosine
  modified_base 11: mod_base = OTHER; note = 2'-fluorouridine
  modified_base 12: mod_base = um
  modified_base 13: mod_base = um
  modified_base 14: mod_base = OTHER; note = 2'-O-methyladenosine
  modified_base 15: mod_base = um
  modified_base 16: mod_base = um
  modified_base 17: mod_base = gm
  modified_base 18: mod_base = um
  modified_base 19: mod_base = cm
  modified_base 20: mod_base = um
  modified_base 21: mod_base = OTHER; note = 2'-O-methyladenosine
  source 1..21: mol_type = other RNA
ttcctcggtatttattgtcta

SEQ ID NO: 1109 - RNA, 21 nt, synthetic construct
  modified_base 1: mod_base = OTHER; note = 2'-O-methyladenosine
  modified_base 2: mod_base = cm
  modified_base 3: mod_base = um
  modified_base 4: mod_base = cm
  modified_base 5: mod_base = gm
  modified_base 6: mod_base = gm
  modified_base 7: mod_base = gm
  modified_base 8: mod_base = OTHER; note = 2'-O-methyladenosine
  modified_base 9: mod_base = OTHER; note = 2'-fluoroadenosine
  modified_base 10: mod_base = OTHER; note = 2'-fluoroadenosine
  modified_base 11: mod_base = OTHER; note = 2'-fluorouridine
  modified_base 12: mod_base = um
  modified_base 13: mod_base = um
  modified_base 14: mod_base = gm
  modified_base 15: mod_base = cm
  modified_base 16: mod_base = um
  modified_base 17: mod_base = um
  modified_base 18: mod_base = um
  modified_base 19: mod_base = um
  modified_base 20: mod_base = gm
  modified_base 21: mod_base = OTHER; note = 2'-O-methyladenosine
  source 1..21: mol_type = other RNA
actcgggaaatttgcttttga

SEQ ID NO: 1110 - RNA, 21 nt, synthetic construct
  modified_base 1: mod_base = gm
  modified_base 2: mod_base = gm
  modified_base 3: mod_base = OTHER; note = 2'-O-methyladenosine
  modified_base 4: mod_base = OTHER; note = 2'-O-methyladenosine
  modified_base 5: mod_base = OTHER; note = 2'-O-methyladenosine
  modified_base 6: mod_base = um
  modified_base 7: mod_base = um
  modified_base 8: mod_base = um
  modified_base 9: mod_base = OTHER; note = 2'-fluoroguanosine
  modified_base 10: mod_base = OTHER; note = 2'-fluorocytidine
  modified_base 11: mod_base = OTHER; note = 2'-fluorouridine
  modified_base 12: mod_base = um
  modified_base 13: mod_base = um
  modified_base 14: mod_base = um
  modified_base 15: mod_base = gm
  modified_base 16: mod_base = um
  modified_base 17: mod_base = cm
  modified_base 18: mod_base = OTHER; note = 2'-O-methyladenosine
  modified_base 19: mod_base = OTHER; note = 2'-O-methyladenosine
  modified_base 20: mod_base = OTHER; note = 2'-O-methyladenosine
  modified_base 21: mod_base = OTHER; note = 2'-O-methyladenosine
  source 1..21: mol_type = other RNA
ggaaatttgcttttgtcaaaa

SEQ ID NO: 1111 - RNA, 21 nt, synthetic construct
  modified_base 1: mod_base = um
  modified_base 2: mod_base = cm
  modified_base 3: mod_base = gm
  modified_base 4: mod_base = gm
  modified_base 5: mod_base = cm
  modified_base 6: mod_base = gm
  modified_base 7: mod_base = gm
  modified_base 8: mod_base = um
  modified_base 9: mod_base = OTHER; note = 2'-fluorouridine
  modified_base 10: mod_base = OTHER; note = 2'-fluorouridine
  modified_base 11: mod_base = OTHER; note = 2'-fluoroguanosine
  modified_base 12: mod_base = gm
  modified_base 13: mod_base = OTHER; note = 2'-O-methyladenosine
  modified_base 14: mod_base = um
  modified_base 15: mod_base = OTHER; note = 2'-O-methyladenosine
  modified_base 16: mod_base = um
  modified_base 17: mod_base = um
  modified_base 18: mod_base = um
  modified_base 19: mod_base = OTHER; note = 2'-O-methyl-2-aminoadenosine
  modified_base 20: mod_base = um
  modified_base 21: mod_base = um
  source 1..21: mol_type = other RNA
tcggcggtttggatatttntt

SEQ ID NO: 1112 - RNA, 21 nt, synthetic construct
  modified_base 1: mod_base = cm
  modified_base 2: mod_base = gm
  modified_base 3: mod_base = gm
  modified_base 4: mod_base = cm
  modified_base 5: mod_base = gm
  modified_base 6: mod_base = gm
  modified_base 7: mod_base = um
  modified_base 8: mod_base = um
  modified_base 9: mod_base = OTHER; note = 2'-fluorouridine
  modified_base 10: mod_base = OTHER; note = 2'-fluoroguanosine
  modified_base 11: mod_base = OTHER; note = 2'-fluoroguanosine
  modified_base 12: mod_base = OTHER; note = 2'-O-methyladenosine
  modified_base 13: mod_base = um
  modified_base 14: mod_base = OTHER; note = 2'-O-methyladenosine
  modified_base 15: mod_base = um
  modified_base 16: mod_base = um
  modified_base 17: mod_base = um
  modified_base 18: mod_base = OTHER; note = 2'-O-methyl-2-aminoadenosine
  modified_base 19: mod_base = um
  modified_base 20: mod_base = um
  modified_base 21: mod_base = OTHER; note = 2'-O-methyladenosine
  source 1..21: mol_type = other RNA
cggcggtttggatatttntta

SEQ ID NO: 1113 - RNA, 21 nt, synthetic construct
  modified_base 1: mod_base = OTHER; note = 2'-O-methyladenosine
  modified_base 2: mod_base = OTHER; note = 2'-O-methyladenosine
  modified_base 3: mod_base = cm
  modified_base 4: mod_base = cm
  modified_base 5: mod_base = cm
  modified_base 6: mod_base = cm
  modified_base 7: mod_base = OTHER; note = 2'-O-methyladenosine
  modified_base 8: mod_base = OTHER; note = 2'-O-methyladenosine
  modified_base 9: mod_base = OTHER; note = 2'-fluorouridine
  modified_base 10: mod_base = OTHER; note = 2'-fluorocytidine
  modified_base 11: mod_base = OTHER; note = 2'-fluorocytidine
  modified_base 12: mod_base = OTHER; note = 2'-O-methyladenosine
  modified_base 13: mod_base = cm
  modified_base 14: mod_base = gm
  modified_base 15: mod_base = um
  modified_base 16: mod_base = um
  modified_base 17: mod_base = um
  modified_base 18: mod_base = um
  modified_base 19: mod_base = gm
  modified_base 20: mod_base = gm
  modified_base 21: mod_base = OTHER; note = 2'-O-methyladenosine
  source 1..21: mol_type = other RNA
aaccccaatccacgttttgga

SEQ ID NO: 1114 - RNA, 21 nt, synthetic construct
  modified_base 1: mod_base = gm
  modified_base 2: mod_base = OTHER; note = 2'-O-methyladenosine
  modified_base 3: mod_base = um
  modified_base 4: mod_base = cm
  modified_base 5: mod_base = cm
  modified_base 6: mod_base = OTHER; note = 2'-O-methyladenosine
  modified_base 7: mod_base = cm
  modified_base 8: mod_base = gm
  modified_base 9: mod_base = OTHER; note = 2'-fluorouridine
  modified_base 10: mod_base = OTHER; note = 2'-fluorouridine
  modified_base 11: mod_base = OTHER; note = 2'-fluorouridine
  modified_base 12: mod_base = um
  modified_base 13: mod_base = gm
  modified_base 14: mod_base = gm
  modified_base 15: mod_base = OTHER; note = 2'-O-methyladenosine
  modified_base 16: mod_base = um
  modified_base 17: mod_base = OTHER; note = 2'-O-methylinosine
  modified_base 18: mod_base = cm
  modified_base 19: mod_base = OTHER; note = 2'-O-methyladenosine
  modified_base 20: mod_base = cm
  modified_base 21: mod_base = um
  source 1..21: mol_type = other RNA
gatccacgttttggatncact

SEQ ID NO: 1115 - RNA, 21 nt, synthetic construct
  modified_base 1: mod_base = OTHER; note = 2'-O-methyladenosine
  modified_base 2: mod_base = cm
  modified_base 3: mod_base = gm
  modified_base 4: mod_base = um
  modified_base 5: mod_base = um
  modified_base 6: mod_base = um
  modified_base 7: mod_base = um
  modified_base 8: mod_base = gm
  modified_base 9: mod_base = OTHER; note = 2'-fluoroguanosine
  modified_base 10: mod_base = OTHER; note = 2'-fluoroadenosine
  modified_base 11: mod_base = OTHER; note = 2'-fluorouridine
  modified_base 12: mod_base = gm
  modified_base 13: mod_base = cm
  modified_base 14: mod_base = OTHER; note = 2'-O-methyladenosine
  modified_base 15: mod_base = cm
  modified_base 16: mod_base = um
  modified_base 17: mod_base = OTHER; note = 2'-O-methylinosine
  modified_base 18: mod_base = OTHER; note = 2'-O-methyladenosine
  modified_base 19: mod_base = gm
  modified_base 20: mod_base = OTHER; note = 2'-O-methyladenosine
  modified_base 21: mod_base = OTHER; note = 2'-O-methyladenosine
  source 1..21: mol_type = other RNA
acgttttggatgcactnagaa

SEQ ID NO: 1116 - RNA, 21 nt, synthetic construct
  modified_base 1: mod_base = cm
  modified_base 2: mod_base = gm
  modified_base 3: mod_base = um
  modified_base 4: mod_base = um
  modified_base 5: mod_base = um
  modified_base 6: mod_base = um
  modified_base 7: mod_base = gm
  modified_base 8: mod_base = gm
  modified_base 9: mod_base = OTHER; note = 2'-fluoroadenosine
  modified_base 10: mod_base = OTHER; note = 2'-fluorouridine
  modified_base 11: mod_base = OTHER; note = 2'-fluoroguanosine
  modified_base 12: mod_base = cm
  modified_base 13: mod_base = OTHER; note = 2'-O-methyladenosine
  modified_base 14: mod_base = cm
  modified_base 15: mod_base = um
  modified_base 16: mod_base = OTHER; note = 2'-O-methylinosine
  modified_base 17: mod_base = OTHER; note = 2'-O-methyladenosine
  modified_base 18: mod_base = gm
  modified_base 19: mod_base = OTHER; note = 2'-O-methyladenosine
  modified_base 20: mod_base = cm
  modified_base 21: mod_base = OTHER; note = 2'-O-methyladenosine
  source 1..21: mol_type = other RNA
cgttttggatgcactnagaca

SEQ ID NO: 1117 - RNA, 21 nt, synthetic construct
  modified_base 1: mod_base = OTHER; note = 2'-O-methyladenosine
  modified_base 2: mod_base = um
  modified_base 3: mod_base = um
  modified_base 4: mod_base = cm
  modified_base 5: mod_base = cm
  modified_base 6: mod_base = um
  modified_base 7: mod_base = cm
  modified_base 8: mod_base = gm
  modified_base 9: mod_base = OTHER; note = 2'-fluoroguanosine
  modified_base 10: mod_base = OTHER; note = 2'-fluorouridine
  modified_base 11: mod_base = OTHER; note = 2'-fluoroadenosine
  modified_base 12: mod_base = um
  modified_base 13: mod_base = um
  modified_base 14: mod_base = um
  modified_base 15: mod_base = OTHER; note = 2'-O-methyladenosine
  modified_base 16: mod_base = um
  modified_base 17: mod_base = um
  modified_base 18: mod_base = gm
  modified_base 19: mod_base = um
  modified_base 20: mod_base = cm
  modified_base 21: mod_base = um
  source 1..21: mol_type = other RNA
attcctcggtatttattgtct

SEQ ID NO: 1118 - RNA, 21 nt, synthetic construct
  modified_base 1: mod_base = cm
  modified_base 2: mod_base = cm
  modified_base 3: mod_base = um
  modified_base 4: mod_base = cm
  modified_base 5: mod_base = gm
  modified_base 6: mod_base = gm
  modified_base 7: mod_base = um
  modified_base 8: mod_base = OTHER; note = 2'-O-methyladenosine
  modified_base 9: mod_base = OTHER; note = 2'-fluorouridine
  modified_base 10: mod_base = OTHER; note = 2'-fluorouridine
  modified_base 11: mod_base = OTHER; note = 2'-fluorouridine
  modified_base 12: mod_base = OTHER; note = 2'-O-methyladenosine
  modified_base 13: mod_base = um
  modified_base 14: mod_base = um
  modified_base 15: mod_base = gm
  modified_base 16: mod_base = um
  modified_base 17: mod_base = um
  modified_base 18: mod_base = um
  modified_base 19: mod_base = gm
  modified_base 20: mod_base = um
  modified_base 21: mod_base = OTHER; note = 2'-O-methyladenosine
  source 1..21: mol_type = other RNA
cctcggtatttattgtttgta

SEQ ID NO: 1119 - RNA, 21 nt, synthetic construct
  modified_base 1: mod_base = gm
  modified_base 2: mod_base = cm
  modified_base 3: mod_base = OTHER; note = 2'-O-methyladenosine
  modified_base 4: mod_base = um
  modified_base 5: mod_base = um
  modified_base 6: mod_base = cm
  modified_base 7: mod_base = cm
  modified_base 8: mod_base = um
  modified_base 9: mod_base = OTHER; note = 2'-fluorocytidine
  modified_base 10: mod_base = OTHER; note = 2'-fluoroguanosine
  modified_base 11: mod_base = OTHER; note = 2'-fluoroguanosine
  modified_base 12: mod_base = um
  modified_base 13: mod_base = OTHER; note = 2'-O-methyladenosine
  modified_base 14: mod_base = um
  modified_base 15: mod_base = um
  modified_base 16: mod_base = um
  modified_base 17: mod_base = OTHER; note = 2'-O-methyladenosine
  modified_base 18: mod_base = um
  modified_base 19: mod_base = um
  modified_base 20: mod_base = gm
  modified_base 21: mod_base = um
  source 1..21: mol_type = other RNA
gcattcctcggtatttattgt

SEQ ID NO: 1120 - RNA, 21 nt, synthetic construct
  modified_base 1: mod_base = cm
  modified_base 2: mod_base = cm
  modified_base 3: mod_base = um
  modified_base 4: mod_base = gm
  modified_base 5: mod_base = gm
  modified_base 6: mod_base = um
  modified_base 7: mod_base = cm
  modified_base 8: mod_base = OTHER; note = 2'-O-methyladenosine
  modified_base 9: mod_base = OTHER; note = 2'-fluorouridine
  modified_base 10: mod_base = OTHER; note = 2'-fluoroguanosine
  modified_base 11: mod_base = OTHER; note = 2'-fluoroguanosine
  modified_base 12: mod_base = OTHER; note = 2'-O-methyladenosine
  modified_base 13: mod_base = gm
  modified_base 14: mod_base = um
  modified_base 15: mod_base = OTHER; note = 2'-O-methyladenosine
  modified_base 16: mod_base = um
  modified_base 17: mod_base = um
  modified_base 18: mod_base = OTHER; note = 2'-O-methyladenosine
  modified_base 19: mod_base = cm
  modified_base 20: mod_base = gm
  modified_base 21: mod_base = um
  source 1..21: mol_type = other RNA
cctggtcatggagtattacgt

SEQ ID NO: 1121 - RNA, 21 nt, synthetic construct
  modified_base 1: mod_base = gm
  modified_base 2: mod_base = um
  modified_base 3: mod_base = cm
  modified_base 4: mod_base = cm
  modified_base 5: mod_base = um
  modified_base 6: mod_base = cm
  modified_base 7: mod_base = gm
  modified_base 8: mod_base = gm
  modified_base 9: mod_base = OTHER; note = 2'-fluorouridine
  modified_base 10: mod_base = OTHER; note = 2'-fluoroadenosine
  modified_base 11: mod_base = OTHER; note = 2'-fluorouridine
  modified_base 12: mod_base = um
  modified_base 13: mod_base = um
  modified_base 14: mod_base = OTHER; note = 2'-O-methyladenosine
  modified_base 15: mod_base = um
  modified_base 16: mod_base = um
  modified_base 17: mod_base = gm
  modified_base 18: mod_base = um
  modified_base 19: mod_base = cm
  modified_base 20: mod_base = um
  modified_base 21: mod_base = OTHER; note = 2'-O-methyladenosine
  source 1..21: mol_type = other RNA
gtcctcggtatttattgtcta

SEQ ID NO: 1122 - RNA, 21 nt, synthetic construct
  modified_base 1: mod_base = um
  modified_base 2: mod_base = um
  modified_base 3: mod_base = cm
  modified_base 4: mod_base = cm
  modified_base 5: mod_base = um
  modified_base 6: mod_base = cm
  modified_base 7: mod_base = gm
  modified_base 8: mod_base = gm
  modified_base 9: mod_base = OTHER; note = 2'-fluorouridine
  modified_base 10: mod_base = OTHER; note = 2'-O-methyladenosine
  modified_base 11: mod_base = OTHER; note = 2'-fluorouridine
  modified_base 12: mod_base = um
  modified_base 13: mod_base = OTHER; note = 2'-fluorouridine
  modified_base 14: mod_base = OTHER; note = 2'-O-methyladenosine
  modified_base 15: mod_base = um
  modified_base 16: mod_base = um
  modified_base 17: mod_base = gm
  modified_base 18: mod_base = um
  modified_base 19: mod_base = cm
  modified_base 20: mod_base = um
  modified_base 21: mod_base = OTHER; note = 2'-O-methyladenosine
  source 1..21: mol_type = other RNA
ttcctcggtatttattgtcta

SEQ ID NO: 1123 - RNA, 21 nt, synthetic construct
  modified_base 1: mod_base = cm
  modified_base 2: mod_base = cm
  modified_base 3: mod_base = um
  modified_base 4: mod_base = gm
  modified_base 5: mod_base = gm
  modified_base 6: mod_base = um
  modified_base 7: mod_base = cm
  modified_base 8: mod_base = OTHER; note = 2'-O-methyladenosine
  modified_base 9: mod_base = OTHER; note = 2'-fluorouridine
  modified_base 10: mod_base = gm
  modified_base 11: mod_base = OTHER; note = 2'-fluoroguanosine
  modified_base 12: mod_base = OTHER; note = 2'-O-methyladenosine
  modified_base 13: mod_base = OTHER; note = 2'-fluoroguanosine
  modified_base 14: mod_base = um
  modified_base 15: mod_base = OTHER; note = 2'-O-methyladenosine
  modified_base 16: mod_base = um
  modified_base 17: mod_base = um
  modified_base 18: mod_base = OTHER; note = 2'-O-methyladenosine
  modified_base 19: mod_base = cm
  modified_base 20: mod_base = gm
  modified_base 21: mod_base = um
  source 1..21: mol_type = other RNA
cctggtcatggagtattacgt

SEQ ID NO: 1124 - RNA, 21 nt, synthetic construct
  modified_base 1: mod_base = cm
  modified_base 2: mod_base = cm
  modified_base 3: mod_base = um
  modified_base 4: mod_base = gm
  modified_base 5: mod_base = gm
  modified_base 6: mod_base = um
  modified_base 7: mod_base = cm
  modified_base 8: mod_base = OTHER; note = 2'-O-methyladenosine
  modified_base 9: mod_base = OTHER; note = 2'-fluorouridine
  modified_base 10: mod_base = gm
  modified_base 11: mod_base = OTHER; note = 2'-fluoroguanosine
  modified_base 12: mod_base = OTHER; note = 2'-O-methyladenosine
  modified_base 13: mod_base = gm
  modified_base 14: mod_base = um
  modified_base 15: mod_base = OTHER; note = 2'-O-methyladenosine
  modified_base 16: mod_base = um
  modified_base 17: mod_base = um
  modified_base 18: mod_base = OTHER; note = 2'-O-methyladenosine
  modified_base 19: mod_base = cm
  modified_base 20: mod_base = gm
  modified_base 21: mod_base = um
  source 1..21: mol_type = other RNA
cctggtcatggagtattacgt

SEQ ID NO: 1125 - RNA, 21 nt, synthetic construct
  modified_base 1: mod_base = cm
  modified_base 2: mod_base = cm
  modified_base 3: mod_base = cm
  modified_base 4: mod_base = cm
  modified_base 5: mod_base = gm
  modified_base 6: mod_base = OTHER; note = 2'-O-methyladenosine
  modified_base 7: mod_base = cm
  modified_base 8: mod_base = OTHER; note = 2'-O-methyladenosine
  modified_base 9: mod_base = OTHER; note = 2'-fluorouridine
  modified_base 10: mod_base = OTHER; note = 2'-fluorouridine
  modified_base 11: mod_base = OTHER; note = 2'-fluorocytidine
  modified_base 12: mod_base = cm
  modified_base 13: mod_base = um
  modified_base 14: mod_base = cm
  modified_base 15: mod_base = gm
  modified_base 16: mod_base = gm
  modified_base 17: mod_base = um
  modified_base 18: mod_base = OTHER; note = 2'-O-methyladenosine
  modified_base 19: mod_base = um
  modified_base 20: mod_base = um
  modified_base 21: mod_base = OTHER; note = 2'-O-methyladenosine
  source 1..21: mol_type = other RNA
ccccgacattcctcggtatta

SEQ ID NO: 1126 - RNA, 21 nt, synthetic construct
  modified_base 1: mod_base = um
  modified_base 2: mod_base = um
  modified_base 3: mod_base = cm
  modified_base 4: mod_base = cm
  modified_base 5: mod_base = um
  modified_base 6: mod_base = cm
  modified_base 7: mod_base = gm
  modified_base 8: mod_base = gm
  modified_base 9: mod_base = OTHER; note = 2'-fluorouridine
  modified_base 10: mod_base = OTHER; note = 2'-fluoroadenosine
  modified_base 11: mod_base = OTHER; note = 2'-fluorouridine
  modified_base 12: mod_base = um
  modified_base 13: mod_base = um
  modified_base 14: mod_base = OTHER; note = 2'-O-methyladenosine
  modified_base 15: mod_base = um
  modified_base 16: mod_base = um
  modified_base 17: mod_base = gm
  modified_base 18: mod_base = um
  modified_base 19: mod_base = cm
  modified_base 20: mod_base = um
  modified_base 21: mod_base = OTHER; note = 2'-O-methyladenosine
  source 1..21: mol_type = other RNA
ttcctcggtatttattgtcta

SEQ ID NO: 1127 - RNA, 21 nt, synthetic construct
  modified_base 1: mod_base = um
  modified_base 2: mod_base = gm
  modified_base 3: mod_base = gm
  modified_base 4: mod_base = cm
  modified_base 5: mod_base = OTHER; note = 2'-O-methyladenosine
  modified_base 6: mod_base = OTHER; note = 2'-O-methyladenosine
  modified_base 7: mod_base = gm
  modified_base 8: mod_base = OTHER; note = 2'-O-methyladenosine
  modified_base 9: mod_base = OTHER; note = 2'-fluorouridine
  modified_base 10: mod_base = cm
  modified_base 11: mod_base = OTHER; note = 2'-fluoroguanosine
  modified_base 12: mod_base = um
  modified_base 13: mod_base = cm
  modified_base 14: mod_base = cm
  modified_base 15: mod_base = OTHER; note = 2'-O-methyladenosine
  modified_base 16: mod_base = cm
  modified_base 17: mod_base = um
  modified_base 18: mod_base = OTHER; note = 2'-O-methyladenosine
  modified_base 19: mod_base = cm
  modified_base 20: mod_base = OTHER; note = 2'-O-methyladenosine
  modified_base 21: mod_base = OTHER; note = 2'-O-methyladenosine
  source 1..21: mol_type = other RNA
tggcaagatcgtccactacaa

SEQ ID NO: 1128 - RNA, 21 nt, synthetic construct
  modified_base 1: mod_base = um
  modified_base 2: mod_base = gm
  modified_base 3: mod_base = gm
  modified_base 4: mod_base = cm
  modified_base 5: mod_base = OTHER; note = 2'-O-methyladenosine
  modified_base 6: mod_base = OTHER; note = 2'-O-methyladenosine
  modified_base 7: mod_base = OTHER; note = 2'-fluoroguanosine
  modified_base 8: mod_base = OTHER; note = 2'-O-methyladenosine
  modified_base 9: mod_base = OTHER; note = 2'-fluorouridine
  modified_base 10: mod_base = cm
  modified_base 11: mod_base = OTHER; note = 2'-fluoroguanosine
  modified_base 12: mod_base = um
  modified_base 13: mod_base = cm
  modified_base 14: mod_base = cm
  modified_base 15: mod_base = OTHER; note = 2'-O-methyladenosine
  modified_base 16: mod_base = cm
  modified_base 17: mod_base = um
  modified_base 18: mod_base = OTHER; note = 2'-O-methyladenosine
  modified_base 19: mod_base = cm
  modified_base 20: mod_base = OTHER; note = 2'-O-methyladenosine
  modified_base 21: mod_base = OTHER; note = 2'-O-methyladenosine
  source 1..21: mol_type = other RNA
tggcaagatcgtccactacaa

SEQ ID NO: 1129 - RNA, 21 nt, synthetic construct
  modified_base 1: mod_base = gm
  modified_base 2: mod_base = um
  modified_base 3: mod_base = cm
  modified_base 4: mod_base = cm
  modified_base 5: mod_base = um
  modified_base 6: mod_base = cm
  modified_base 7: mod_base = gm
  modified_base 8: mod_base = gm
  modified_base 9: mod_base = OTHER; note = 2'-fluorouridine
  modified_base 10: mod_base = OTHER; note = 2'-O-methyladenosine
  modified_base 11: mod_base = OTHER; note = 2'-fluorouridine
  modified_base 12: mod_base = um
  modified_base 13: mod_base = OTHER; note = 2'-fluorouridine
  modified_base 14: mod_base = OTHER; note = 2'-O-methyladenosine
  modified_base 15: mod_base = um
  modified_base 16: mod_base = um
  modified_base 17: mod_base = gm
  modified_base 18: mod_base = um
  modified_base 19: mod_base = cm
  modified_base 20: mod_base = um
  modified_base 21: mod_base = OTHER; note = 2'-O-methyladenosine
  source 1..21: mol_type = other RNA
gtcctcggtatttattgtcta

SEQ ID NO: 1130 - RNA, 21 nt, synthetic construct
  modified_base 1: mod_base = um
  modified_base 2: mod_base = um
  modified_base 3: mod_base = cm
  modified_base 4: mod_base = cm
  modified_base 5: mod_base = um
  modified_base 6: mod_base = cm
  modified_base 7: mod_base = gm
  modified_base 8: mod_base = gm
  modified_base 9: mod_base = OTHER; note = 2'-fluorouridine
  modified_base 10: mod_base = OTHER; note = 2'-O-methyladenosine
  modified_base 11: mod_base = OTHER; note = 2'-fluorouridine
  modified_base 12: mod_base = OTHER; note = 2'-fluorouridine
  modified_base 13: mod_base = um
  modified_base 14: mod_base = OTHER; note = 2'-O-methyladenosine
  modified_base 15: mod_base = um
  modified_base 16: mod_base = um
  modified_base 17: mod_base = gm
  modified_base 18: mod_base = um
  modified_base 19: mod_base = cm
  modified_base 20: mod_base = um
  modified_base 21: mod_base = OTHER; note = 2'-O-methyladenosine
  source 1..21: mol_type = other RNA
ttcctcggtatttattgtcta

SEQ ID NO: 1131 - RNA, 21 nt, synthetic construct
  modified_base 1: mod_base = OTHER; note = 2'-O-methyladenosine
  modified_base 2: mod_base = cm
  modified_base 3: mod_base = OTHER; note = 2'-O-methyladenosine
  modified_base 4: mod_base = OTHER; note = 2'-O-methyladenosine
  modified_base 5: mod_base = gm
  modified_base 6: mod_base = um
  modified_base 7: mod_base = gm
  modified_base 8: mod_base = gm
  modified_base 9: mod_base = OTHER; note = 2'-fluoroguanosine
  modified_base 10: mod_base = OTHER; note = 2'-fluoroadenosine
  modified_base 11: mod_base = OTHER; note = 2'-fluorocytidine
  modified_base 12: mod_base = OTHER; note = 2'-O-methyladenosine
  modified_base 13: mod_base = um
  modified_base 14: mod_base = gm
  modified_base 15: mod_base = cm
  modified_base 16: mod_base = um
  modified_base 17: mod_base = OTHER; note = 2'-O-methylinosine
  modified_base 18: mod_base = OTHER; note = 2'-O-methyladenosine
  modified_base 19: mod_base = OTHER; note = 2'-O-methyladenosine
  modified_base 20: mod_base = gm
  modified_base 21: mod_base = OTHER; note = 2'-O-methyladenosine
  source 1..21: mol_type = other RNA
acaagtgggacatgctnaaga

SEQ ID NO: 1132 - RNA, 21 nt, synthetic construct
  modified_base 1: mod_base = cm
  modified_base 2: mod_base = OTHER; note = 2'-O-methyladenosine
  modified_base 3: mod_base = OTHER; note = 2'-O-methyladenosine
  modified_base 4: mod_base = gm
  modified_base 5: mod_base = um
  modified_base 6: mod_base = gm
  modified_base 7: mod_base = gm
  modified_base 8: mod_base = gm
  modified_base 9: mod_base = OTHER; note = 2'-fluoroadenosine
  modified_base 10: mod_base = OTHER; note = 2'-fluorocytidine
  modified_base 11: mod_base = OTHER; note = 2'-fluoroadenosine
  modified_base 12: mod_base = um
  modified_base 13: mod_base = gm
  modified_base 14: mod_base = cm
  modified_base 15: mod_base = um
  modified_base 16: mod_base = OTHER; note = 2'-O-methylinosine
  modified_base 17: mod_base = OTHER; note = 2'-O-methyladenosine
  modified_base 18: mod_base = OTHER; note = 2'-O-methyladenosine
  modified_base 19: mod_base = gm
  modified_base 20: mod_base = OTHER; note = 2'-O-methyladenosine
  modified_base 21: mod_base = OTHER; note = 2'-O-methyladenosine
  source 1..21: mol_type = other RNA
caagtgggacatgctnaagaa

SEQ ID NO: 1133 - RNA, 21 nt, synthetic construct
  modified_base 1: mod_base = cm
  modified_base 2: mod_base = um
  modified_base 3: mod_base = um
  modified_base 4: mod_base = cm
  modified_base 5: mod_base = cm
  modified_base 6: mod_base = OTHER; note = 2'-O-methyladenosine
  modified_base 7: mod_base = gm
  modified_base 8: mod_base = gm
  modified_base 9: mod_base = OTHER; note = 2'-fluoroadenosine
  modified_base 10: mod_base = OTHER; note = 2'-fluorouridine
  modified_base 11: mod_base = OTHER; note = 2'-fluoroguanosine
  modified_base 12: mod_base = OTHER; note = 2'-O-methyladenosine
  modified_base 13: mod_base = gm
  modified_base 14: mod_base = OTHER; note = 2'-O-methyladenosine
  modified_base 15: mod_base = OTHER; note = 2'-O-methyladenosine
  modified_base 16: mod_base = cm
  modified_base 17: mod_base = um
  modified_base 18: mod_base = OTHER; note = 2'-O-methyladenosine
  modified_base 19: mod_base = cm
  modified_base 20: mod_base = um
  modified_base 21: mod_base = um
  source 1..21: mol_type = other RNA
cttccaggatgagaactactt

SEQ ID NO: 1134 - RNA, 21 nt, synthetic construct
  modified_base 1: mod_base = cm
  modified_base 2: mod_base = um
  modified_base 3: mod_base = um
  modified_base 4: mod_base = cm
  modified_base 5: mod_base = cm
  modified_base 6: mod_base = OTHER; note = 2'-O-methyladenosine
  modified_base 7: mod_base = gm
  modified_base 8: mod_base = gm
  modified_base 9: mod_base = OTHER; note = 2'-fluoroadenosine
  modified_base 10: mod_base = OTHER; note = 2'-fluorouridine
  modified_base 11: mod_base = OTHER; note = 2'-fluoroguanosine
  modified_base 12: mod_base = OTHER; note = 2'-O-methyladenosine
  modified_base 13: mod_base = gm
  modified_base 14: mod_base = OTHER; note = 2'-O-methyladenosine
  modified_base 15: mod_base = OTHER; note = 2'-O-methyladenosine
  modified_base 16: mod_base = cm
  modified_base 17: mod_base = um
  modified_base 18: mod_base = OTHER; note = 2'-O-methyladenosine
  modified_base 19: mod_base = um
  modified_base 20: mod_base = cm
  modified_base 21: mod_base = um
  source 1..21: mol_type = other RNA
cttccaggatgagaactatct

SEQ ID NO: 1135 - RNA, 21 nt, synthetic construct
  modified_base 1: mod_base = um
  modified_base 2: mod_base = cm
  modified_base 3: mod_base = cm
  modified_base 4: mod_base = OTHER; note = 2'-O-methyladenosine
  modified_base 5: mod_base = gm
  modified_base 6: mod_base = gm
  modified_base 7: mod_base = OTHER; note = 2'-O-methyladenosine
  modified_base 8: mod_base = um
  modified_base 9: mod_base = OTHER; note = 2'-fluoroguanosine
  modified_base 10: mod_base = OTHER; note = 2'-fluoroadenosine
  modified_base 11: mod_base = OTHER; note = 2'-fluoroguanosine
  modified_base 12: mod_base = OTHER; note = 2'-O-methyladenosine
  modified_base 13: mod_base = OTHER; note = 2'-O-methyladenosine
  modified_base 14: mod_base = cm
  modified_base 15: mod_base = um
  modified_base 16: mod_base = OTHER; note = 2'-O-methyladenosine
  modified_base 17: mod_base = cm
  modified_base 18: mod_base = cm
  modified_base 19: mod_base = um
  modified_base 20: mod_base = OTHER; note = 2'-O-methylinosine
  modified_base 21: mod_base = um
  source 1..21: mol_type = other RNA
tccaggatgagaactacctnt

SEQ ID NO: 1136 - RNA, 21 nt, synthetic construct
  modified_base 1: mod_base = um
  modified_base 2: mod_base = cm
  modified_base 3: mod_base = cm
  modified_base 4: mod_base = OTHER; note = 2'-O-methyladenosine
  modified_base 5: mod_base = gm
  modified_base 6: mod_base = gm
  modified_base 7: mod_base = OTHER; note = 2'-O-methyladenosine
  modified_base 8: mod_base = um
  modified_base 9: mod_base = OTHER; note = 2'-fluoroguanosine
  modified_base 10: mod_base = OTHER; note = 2'-fluoroadenosine
  modified_base 11: mod_base = OTHER; note = 2'-fluoroguanosine
  modified_base 12: mod_base = OTHER; note = 2'-O-methyladenosine
  modified_base 13: mod_base = OTHER; note = 2'-O-methyladenosine
  modified_base 14: mod_base = cm
  modified_base 15: mod_base = um
  modified_base 16: mod_base = OTHER; note = 2'-O-methyladenosine
  modified_base 17: mod_base = cm
  modified_base 18: mod_base = um
  modified_base 19: mod_base = um
  modified_base 20: mod_base = gm
  modified_base 21: mod_base = um
  source 1..21: mol_type = other RNA
tccaggatgagaactacttgt

SEQ ID NO: 1137 - RNA, 21 nt, synthetic construct
  modified_base 1: mod_base = OTHER; note = 2'-O-methyladenosine
  modified_base 2: mod_base = gm
  modified_base 3: mod_base = gm
  modified_base 4: mod_base = OTHER; note = 2'-O-methyladenosine
  modified_base 5: mod_base = um
  modified_base 6: mod_base = gm
  modified_base 7: mod_base = OTHER; note = 2'-O-methyladenosine
  modified_base 8: mod_base = gm
  modified_base 9: mod_base = OTHER; note = 2'-fluoroadenosine
  modified_base 10: mod_base = OTHER; note = 2'-fluoroadenosine
  modified_base 11: mod_base = OTHER; note = 2'-fluorocytidine
  modified_base 12: mod_base = um
  modified_base 13: mod_base = OTHER; note = 2'-O-methyladenosine
  modified_base 14: mod_base = cm
  modified_base 15: mod_base = cm
  modified_base 16: mod_base = um
  modified_base 17: mod_base = OTHER; note = 2'-O-methylinosine
  modified_base 18: mod_base = um
  modified_base 19: mod_base = OTHER; note = 2'-O-methyladenosine
  modified_base 20: mod_base = cm
  modified_base 21: mod_base = OTHER; note = 2'-O-methyladenosine
  source 1..21: mol_type = other RNA
aggatgagaactacctntaca

SEQ ID NO: 1138 - RNA, 21 nt, synthetic construct
  modified_base 1: mod_base = cm
  modified_base 2: mod_base = um
  modified_base 3: mod_base = OTHER; note = 2'-O-methyladenosine
  modified_base 4: mod_base = cm
  modified_base 5: mod_base = cm
  modified_base 6: mod_base = um
  modified_base 7: mod_base = gm
  modified_base 8: mod_base = um
  modified_base 9: mod_base = OTHER; note = 2'-fluoroadenosine
  modified_base 10: mod_base = OTHER; note = 2'-fluorocytidine
  modified_base 11: mod_base = OTHER; note = 2'-fluorocytidine
  modified_base 12: mod_base = um
  modified_base 13: mod_base = gm
  modified_base 14: mod_base = gm
  modified_base 15: mod_base = um
  modified_base 16: mod_base = cm
  modified_base 17: mod_base = OTHER; note = 2'-O-methyladenosine
  modified_base 18: mod_base = um
  modified_base 19: mod_base = OTHER; note = 2'-O-methylinosine
  modified_base 20: mod_base = gm
  modified_base 21: mod_base = OTHER; note = 2'-O-methyladenosine
  source 1..21: mol_type = other RNA
ctacctgtacctggtcatnga

SEQ ID NO: 1139 - RNA, 21 nt, synthetic construct
  modified_base 1: mod_base = cm
  modified_base 2: mod_base = um
  modified_base 3: mod_base = OTHER; note = 2'-O-methyladenosine
  modified_base 4: mod_base = cm
  modified_base 5: mod_base = cm
  modified_base 6: mod_base = um
  modified_base 7: mod_base = gm
  modified_base 8: mod_base = um
  modified_base 9: mod_base = OTHER; note = 2'-fluoroadenosine
  modified_base 10: mod_base = OTHER; note = 2'-fluorocytidine
  modified_base 11: mod_base = OTHER; note = 2'-fluorocytidine
  modified_base 12: mod_base = um
  modified_base 13: mod_base = gm
  modified_base 14: mod_base = gm
  modified_base 15: mod_base = um
  modified_base 16: mod_base = um
  modified_base 17: mod_base = OTHER; note = 2'-O-methyladenosine
  modified_base 18: mod_base = um
  modified_base 19: mod_base = gm
  modified_base 20: mod_base = gm
  modified_base 21: mod_base = OTHER; note = 2'-O-methyladenosine
  source 1..21: mol_type = other RNA
ctacctgtacctggttatgga

SEQ ID NO: 1140 - RNA, 21 nt, synthetic construct
  modified_base 1: mod_base = OTHER; note = 2'-O-methyladenosine
  modified_base 2: mod_base = cm
  modified_base 3: mod_base = OTHER; note = 2'-O-methyladenosine
  modified_base 4: mod_base = cm
  modified_base 5: mod_base = um
  modified_base 6: mod_base = gm
  modified_base 7: mod_base = cm
  modified_base 8: mod_base = um
  modified_base 9: mod_base = OTHER; note = 2'-fluoroguanosine
  modified_base 10: mod_base = OTHER; note = 2'-fluoroadenosine
  modified_base 11: mod_base = OTHER; note = 2'-fluoroguanosine
  modified_base 12: mod_base = cm
  modified_base 13: mod_base = OTHER; note = 2'-O-methyladenosine
  modified_base 14: mod_base = OTHER; note = 2'-O-methyladenosine
  modified_base 15: mod_base = gm
  modified_base 16: mod_base = um
  modified_base 17: mod_base = um
  modified_base 18: mod_base = um
  modified_base 19: mod_base = OTHER; note = 2'-O-methylinosine
  modified_base 20: mod_base = gm
  modified_base 21: mod_base = OTHER; note = 2'-O-methyladenosine
  source 1..21: mol_type = other RNA
acactgctgagcaagtttnga

SEQ ID NO: 1141 - RNA, 21 nt, synthetic construct
  modified_base 1: mod_base = cm
  modified_base 2: mod_base = um
  modified_base 3: mod_base = OTHER; note = 2'-O-methyladenosine
  modified_base 4: mod_base = cm
  modified_base 5: mod_base = OTHER; note = 2'-O-methyladenosine
  modified_base 6: mod_base = OTHER; note = 2'-O-methyladenosine
  modified_base 7: mod_base = gm
  modified_base 8: mod_base = gm
  modified_base 9: mod_base = OTHER; note = 2'-fluoroadenosine
  modified_base 10: mod_base = OTHER; note = 2'-fluoroguanosine
  modified_base 11: mod_base = OTHER; note = 2'-fluorocytidine
  modified_base 12: mod_base = OTHER; note = 2'-O-methyladenosine
  modified_base 13: mod_base = cm
  modified_base 14: mod_base = cm
  modified_base 15: mod_base = um
  modified_base 16: mod_base = cm
  modified_base 17: mod_base = um
  modified_base 18: mod_base = um
  modified_base 19: mod_base = um
  modified_base 20: mod_base = cm
  modified_base 21: mod_base = um
  source 1..21: mol_type = other RNA
ctacaaggagcacctctttct

SEQ ID NO: 1142 - RNA, 21 nt, synthetic construct
  modified_base 1: mod_base = cm
  modified_base 2: mod_base = um
  modified_base 3: mod_base = OTHER; note = 2'-O-methyladenosine
  modified_base 4: mod_base = cm
  modified_base 5: mod_base = OTHER; note = 2'-O-methyladenosine
  modified_base 6: mod_base = OTHER; note = 2'-O-methyladenosine
  modified_base 7: mod_base = gm
  modified_base 8: mod_base = gm
  modified_base 9: mod_base = OTHER; note = 2'-fluoroadenosine
  modified_base 10: mod_base = OTHER; note = 2'-fluoroguanosine
  modified_base 11: mod_base = OTHER; note = 2'-fluorocytidine
  modified_base 12: mod_base = OTHER; note = 2'-O-methyladenosine
  modified_base 13: mod_base = cm
  modified_base 14: mod_base = cm
  modified_base 15: mod_base = um
  modified_base 16: mod_base = um
  modified_base 17: mod_base = um
  modified_base 18: mod_base = cm
  modified_base 19: mod_base = um
  modified_base 20: mod_base = cm
  modified_base 21: mod_base = um
  source 1..21: mol_type = other RNA
ctacaaggagcacctttctct

SEQ ID NO: 1143 - RNA, 21 nt, synthetic construct
  modified_base 1: mod_base = cm
  modified_base 2: mod_base = gm
  modified_base 3: mod_base = gm
  modified_base 4: mod_base = OTHER; note = 2'-O-methyladenosine
  modified_base 5: mod_base = cm
  modified_base 6: mod_base = OTHER; note = 2'-O-methyladenosine
  modified_base 7: mod_base = cm
  modified_base 8: mod_base = OTHER; note = 2'-O-methyladenosine
  modified_base 9: mod_base = OTHER; note = 2'-fluorouridine
  modified_base 10: mod_base = OTHER; note = 2'-fluorocytidine
  modified_base 11: mod_base = OTHER; note = 2'-fluorocytidine
  modified_base 12: mod_base = cm
  modified_base 13: mod_base = um
  modified_base 14: mod_base = um
  modified_base 15: mod_base = cm
  modified_base 16: mod_base = um
  modified_base 17: mod_base = um
  modified_base 18: mod_base = cm
  modified_base 19: mod_base = um
  modified_base 20: mod_base = um
  modified_base 21: mod_base = um
  source 1..21: mol_type = other RNA
cggacacatcccttcttcttt

SEQ ID NO: 1144 - RNA, 21 nt, synthetic construct
  modified_base 1: mod_base = gm
  modified_base 2: mod_base = OTHER; note = 2'-O-methyladenosine
  modified_base 3: mod_base = cm
  modified_base 4: mod_base = OTHER; note = 2'-O-methyladenosine
  modified_base 5: mod_base = cm
  modified_base 6: mod_base = OTHER; note = 2'-O-methyladenosine
  modified_base 7: mod_base = um
  modified_base 8: mod_base = cm
  modified_base 9: mod_base = OTHER; note = 2'-fluorocytidine
  modified_base 10: mod_base = OTHER; note = 2'-fluorocytidine
  modified_base 11: mod_base = OTHER; note = 2'-fluorouridine
  modified_base 12: mod_base = um
  modified_base 13: mod_base = cm
  modified_base 14: mod_base = um
  modified_base 15: mod_base = um
  modified_base 16: mod_base = cm
  modified_base 17: mod_base = um
  modified_base 18: mod_base = um
  modified_base 19: mod_base = um
  modified_base 20: mod_base = gm
  modified_base 21: mod_base = OTHER; note = 2'-O-methyladenosine
  source 1..21: mol_type = other RNA
gacacatcccttcttctttga

SEQ ID NO: 1145 - RNA, 21 nt, synthetic construct
  modified_base 1: mod_base = cm
  modified_base 2: mod_base = cm
  modified_base 3: mod_base = um
  modified_base 4: mod_base = um
  modified_base 5: mod_base = um
  modified_base 6: mod_base = OTHER; note = 2'-O-methyladenosine
  modified_base 7: mod_base = cm
  modified_base 8: mod_base = OTHER; note = 2'-O-methyladenosine
  modified_base 9: mod_base = OTHER; note = 2'-fluorocytidine
  modified_base 10: mod_base = OTHER; note = 2'-fluorocytidine
  modified_base 11: mod_base = OTHER; note = 2'-fluoroguanosine
  modified_base 12: mod_base = gm
  modified_base 13: mod_base = OTHER; note = 2'-O-methyladenosine
  modified_base 14: mod_base = um
  modified_base 15: mod_base = um
  modified_base 16: mod_base = um
  modified_base 17: mod_base = cm
  modified_base 18: mod_base = gm
  modified_base 19: mod_base = OTHER; note = 2'-O-methyladenosine
  modified_base 20: mod_base = OTHER; note = 2'-O-methyladenosine
  modified_base 21: mod_base = OTHER; note = 2'-O-methyladenosine
  source 1..21: mol_type = other RNA
cctttacaccggatttcgaaa

SEQ ID NO: 1146 - RNA, 21 nt, synthetic construct
  modified_base 1: mod_base = um
  modified_base 2: mod_base = OTHER; note = 2'-O-methyladenosine
  modified_base 3: mod_base = cm
  modified_base 4: mod_base = OTHER; note = 2'-O-methyladenosine
  modified_base 5: mod_base = cm
  modified_base 6: mod_base = cm
  modified_base 7: mod_base = gm
  modified_base 8: mod_base = gm
  modified_base 9: mod_base = OTHER; note = 2'-fluoroadenosine
  modified_base 10: mod_base = OTHER; note = 2'-fluorouridine
  modified_base 11: mod_base = OTHER; note = 2'-fluorouridine
  modified_base 12: mod_base = um
  modified_base 13: mod_base = cm
  modified_base 14: mod_base = gm
  modified_base 15: mod_base = OTHER; note = 2'-O-methyladenosine
  modified_base 16: mod_base = OTHER; note = 2'-O-methyladenosine
  modified_base 17: mod_base = gm
  modified_base 18: mod_base = OTHER; note = 2'-O-methylinosine
  modified_base 19: mod_base = um
  modified_base 20: mod_base = gm
  modified_base 21: mod_base = OTHER; note = 2'-O-methyladenosine
  source 1..21: mol_type = other RNA
tacaccggatttcgaagntga

SEQ ID NO: 1147 - RNA, 21 nt, synthetic construct
  modified_base 1: mod_base = cm
  modified_base 2: mod_base = OTHER; note = 2'-O-methyladenosine
  modified_base 3: mod_base = cm
  modified_base 4: mod_base = cm
  modified_base 5: mod_base = gm
  modified_base 6: mod_base = OTHER; note = 2'-O-methyladenosine
  modified_base 7: mod_base = cm
  modified_base 8: mod_base = OTHER; note = 2'-O-methyladenosine
  modified_base 9: mod_base = OTHER; note = 2'-fluorocytidine
  modified_base 10: mod_base = OTHER; note = 2'-fluoroadenosine
  modified_base 11: mod_base = OTHER; note = 2'-fluorouridine
  modified_base 12: mod_base = gm
  modified_base 13: mod_base = cm
  modified_base 14: mod_base = OTHER; note = 2'-O-methyladenosine
  modified_base 15: mod_base = OTHER; note = 2'-O-methyladenosine
  modified_base 16: mod_base = cm
  modified_base 17: mod_base = um
  modified_base 18: mod_base = um
  modified_base 19: mod_base = cm
  modified_base 20: mod_base = OTHER; note = 2'-O-methylinosine
  modified_base 21: mod_base = OTHER; note = 2'-O-methyladenosine
  source 1..21: mol_type = other RNA
caccgacacatgcaacttcna

SEQ ID NO: 1148 - RNA, 21 nt, synthetic construct
  modified_base 1: mod_base = cm
  modified_base 2: mod_base = cm
  modified_base 3: mod_base = gm
  modified_base 4: mod_base = OTHER; note = 2'-O-methyladenosine
  modified_base 5: mod_base = cm
  modified_base 6: mod_base = OTHER; note = 2'-O-methyladenosine
  modified_base 7: mod_base = cm
  modified_base 8: mod_base = OTHER; note = 2'-O-methyladenosine
  modified_base 9: mod_base = OTHER; note = 2'-fluorouridine
  modified_base 10: mod_base = OTHER; note = 2'-fluoroguanosine
  modified_base 11: mod_base = OTHER; note = 2'-fluorocytidine
  modified_base 12: mod_base = OTHER; note = 2'-O-methyladenosine
  modified_base 13: mod_base = OTHER; note = 2'-O-methyladenosine
  modified_base 14: mod_base = cm
  modified_base 15: mod_base = um
  modified_base 16: mod_base = um
  modified_base 17: mod_base = cm
  modified_base 18: mod_base = OTHER; note = 2'-O-methylinosine
  modified_base 19: mod_base = OTHER; note = 2'-O-methyladenosine
  modified_base 20: mod_base = cm
  modified_base 21: mod_base = um
  source 1..21: mol_type = other RNA
ccgacacatgcaacttcnact

SEQ ID NO: 1149 - RNA, 21 nt, synthetic construct
  modified_base 1: mod_base = OTHER; note = 2'-O-methyladenosine
  modified_base 2: mod_base = cm
  modified_base 3: mod_base = OTHER; note = 2'-O-methyladenosine
  modified_base 4: mod_base = um
  modified_base 5: mod_base = gm
  modified_base 6: mod_base = cm
  modified_base 7: mod_base = OTHER; note = 2'-O-methyladenosine
  modified_base 8: mod_base = OTHER; note = 2'-O-methyladenosine
  modified_base 9: mod_base = OTHER; note = 2'-fluorocytidine
  modified_base 10: mod_base = OTHER; note = 2'-fluorouridine
  modified_base 11: mod_base = OTHER; note = 2'-fluorouridine
  modified_base 12: mod_base = cm
  modified_base 13: mod_base = gm
  modified_base 14: mod_base = OTHER; note = 2'-O-methyladenosine
  modified_base 15: mod_base = cm
  modified_base 16: mod_base = um
  modified_base 17: mod_base = um
  modified_base 18: mod_base = OTHER; note = 2'-O-methylinosine
  modified_base 19: mod_base = gm
  modified_base 20: mod_base = um
  modified_base 21: mod_base = OTHER; note = 2'-O-methyladenosine
  source 1..21: mol_type = other RNA
acatgcaacttcgacttngta

SEQ ID NO: 1150 - RNA, 21 nt, synthetic construct
  modified_base 1: mod_base = cm
  modified_base 2: mod_base = cm
  modified_base 3: mod_base = um
  modified_base 4: mod_base = gm
  modified_base 5: mod_base = gm
  modified_base 6: mod_base = um
  modified_base 7: mod_base = cm
  modified_base 8: mod_base = OTHER; note = 2'-O-methyladenosine
  modified_base 9: mod_base = OTHER; note = 2'-fluorouridine
  modified_base 10: mod_base = gm
  modified_base 11: mod_base = OTHER; note = 2'-fluoroguanosine
  modified_base 12: mod_base = OTHER; note = 2'-fluoroadenosine
  modified_base 13: mod_base = gm
  modified_base 14: mod_base = um
  modified_base 15: mod_base = OTHER; note = 2'-O-methyladenosine
  modified_base 16: mod_base = um
  modified_base 17: mod_base = um
  modified_base 18: mod_base = OTHER; note = 2'-O-methyladenosine
  modified_base 19: mod_base = cm
  modified_base 20: mod_base = gm
  modified_base 21: mod_base = um
  source 1..21: mol_type = other RNA
cctggtcatggagtattacgt

SEQ ID NO: 1151 - RNA, 21 nt, synthetic construct
  modified_base 1: mod_base = cm
  modified_base 2: mod_base = cm
  modified_base 3: mod_base = um
  modified_base 4: mod_base = cm
  modified_base 5: mod_base = gm
  modified_base 6: mod_base = gm
  modified_base 7: mod_base = um
  modified_base 8: mod_base = OTHER; note = 2'-O-methyladenosine
  modified_base 9: mod_base = OTHER; note = 2'-fluorouridine
  modified_base 10: mod_base = OTHER; note = 2'-fluorouridine
  modified_base 11: mod_base = OTHER; note = 2'-fluorouridine
  modified_base 12: mod_base = OTHER; note = 2'-O-methyladenosine
  modified_base 13: mod_base = um
  modified_base 14: mod_base = um
  modified_base 15: mod_base = gm
  modified_base 16: mod_base = um
  modified_base 17: mod_base = um
  modified_base 18: mod_base = um
  modified_base 19: mod_base = gm
  modified_base 20: mod_base = um
  modified_base 21: mod_base = OTHER; note = 2'-O-methyladenosine
  source 1..21: mol_type = other RNA
cctcggtatttattgtttgta

SEQ ID NO: 1152 - RNA, 21 nt, synthetic construct
  modified_base 1: mod_base = cm
  modified_base 2: mod_base = cm
  modified_base 3: mod_base = um
  modified_base 4: mod_base = cm
  modified_base 5: mod_base = gm
  modified_base 6: mod_base = gm
  modified_base 7: mod_base = um
  modified_base 8: mod_base = OTHER; note = 2'-O-methyladenosine
  modified_base 9: mod_base = OTHER; note = 2'-fluorouridine
  modified_base 10: mod_base = OTHER; note = 2'-fluorouridine
  modified_base 11: mod_base = OTHER; note = 2'-fluorouridine
  modified_base 12: mod_base = OTHER; note = 2'-O-methyladenosine
  modified_base 13: mod_base = um
  modified_base 14: mod_base = um
  modified_base 15: mod_base = gm
  modified_base 16: mod_base = um
  modified_base 17: mod_base = cm
  modified_base 18: mod_base = um
  modified_base 19: mod_base = gm
  modified_base 20: mod_base = um
  modified_base 21: mod_base = OTHER; note = 2'-O-methyladenosine
  source 1..21: mol_type = other RNA
cctcggtatttattgtctgta

SEQ ID NO: 1153 - RNA, 21 nt, synthetic construct
  modified_base 1: mod_base = cm
  modified_base 2: mod_base = cm
  modified_base 3: mod_base = um
  modified_base 4: mod_base = cm
  modified_base 5: mod_base = gm
  modified_base 6: mod_base = gm
  modified_base 7: mod_base = um
  modified_base 8: mod_base = OTHER; note = 2'-O-methyladenosine
  modified_base 9: mod_base = OTHER; note = 2'-fluorouridine
  modified_base 10: mod_base = OTHER; note = 2'-fluorouridine
  modified_base 11: mod_base = OTHER; note = 2'-fluorouridine
  modified_base 12: mod_base = OTHER; note = 2'-O-methyladenosine
  modified_base 13: mod_base = um
  modified_base 14: mod_base = um
  modified_base 15: mod_base = gm
  modified_base 16: mod_base = um
  modified_base 17: mod_base = cm
  modified_base 18: mod_base = um
  modified_base 19: mod_base = OTHER; note = 2'-O-methylinosine
  modified_base 20: mod_base = um
  modified_base 21: mod_base = OTHER; note = 2'-O-methyladenosine
  source 1..21: mol_type = other RNA
cctcggtatttattgtctnta

SEQ ID NO: 1154 - RNA, 21 nt, synthetic construct
  modified_base 1: mod_base = cm
  modified_base 2: mod_base = cm
  modified_base 3: mod_base = um
  modified_base 4: mod_base = gm
  modified_base 5: mod_base = gm
  modified_base 6: mod_base = um
  modified_base 7: mod_base = cm
  modified_base 8: mod_base = OTHER; note = 2'-O-methyladenosine
  modified_base 9: mod_base = OTHER; note = 2'-fluorouridine
  modified_base 10: mod_base = gm
  modified_base 11: mod_base = OTHER; note = 2'-fluoroguanosine
  modified_base 12: mod_base = OTHER; note = 2'-fluoroadenosine
  modified_base 13: mod_base = gm
  modified_base 14: mod_base = um
  modified_base 15: mod_base = OTHER; note = 2'-O-methyladenosine
  modified_base 16: mod_base = um
  modified_base 17: mod_base = um
  modified_base 18: mod_base = OTHER; note = 2'-O-methyladenosine
  modified_base 19: mod_base = cm
  modified_base 20: mod_base = gm
  modified_base 21: mod_base = OTHER; note = 2'-O-methyladenosine
  source 1..21: mol_type = other RNA
cctggtcatggagtattacga

SEQ ID NO: 1155 - RNA, 19 nt, synthetic construct
  modified_base 1: mod_base = cm
  modified_base 1^2: mod_base = OTHER; note = phosphorothioate linkage
  modified_base 2: mod_base = cm
  modified_base 2^3: mod_base = OTHER; note = phosphorothioate linkage
  modified_base 3: mod_base = cm
  modified_base 4: mod_base = um
  modified_base 5: mod_base = OTHER; note = 2'-O-methyladenosine
  modified_base 6: mod_base = gm
  modified_base 7: mod_base = OTHER; note = 2'-fluoroadenosine
  modified_base 8: mod_base = OTHER; note = 2'-fluoroadenosine
  modified_base 9: mod_base = OTHER; note = 2'-fluorocytidine
  modified_base 10: mod_base = um
  modified_base 11: mod_base = gm
  modified_base 12: mod_base = um
  modified_base 13: mod_base = cm
  modified_base 14: mod_base = um
  modified_base 15: mod_base = um
  modified_base 16: mod_base = cm
  modified_base 17: mod_base = gm
  modified_base 17^18: mod_base = OTHER; note = phosphorothioate linkage
  modified_base 18: mod_base = OTHER; note = 2'-O-methyladenosine
  modified_base 18^19: mod_base = OTHER; note = phosphorothioate linkage
  modified_base 19: mod_base = OTHER; note = 2'-O-methyladenosine
  source 1..19: mol_type = other RNA
ccctagaactgtcttcgaa

SEQ ID NO: 1156 - RNA, 21 nt, synthetic construct
  modified_base 1: mod_base = um
  modified_base 2: mod_base = um
  modified_base 3: mod_base = cm
  modified_base 4: mod_base = cm
  modified_base 5: mod_base = um
  modified_base 6: mod_base = cm
  modified_base 7: mod_base = gm
  modified_base 8: mod_base = gm
  modified_base 9: mod_base = OTHER; note = 2'-fluorouridine
  modified_base 10: mod_base = OTHER; note = 2'-O-methyladenosine
  modified_base 11: mod_base = OTHER; note = 2'-fluorouridine
  modified_base 12: mod_base = OTHER; note = 2'-fluorouridine
  modified_base 13: mod_base = um
  modified_base 14: mod_base = OTHER; note = 2'-O-methyladenosine
  modified_base 15: mod_base = um
  modified_base 16: mod_base = um
  modified_base 17: mod_base = gm
  modified_base 18: mod_base = um
  modified_base 19: mod_base = cm
  modified_base 20: mod_base = um
  modified_base 21: mod_base = OTHER; note = 2'-O-methyladenosine
  source 1..21: mol_type = other RNA
ttcctcggtatttattgtcta

SEQ ID NO: 1157 - RNA, 21 nt, synthetic construct
  modified_base 1: mod_base = cm
  modified_base 2: mod_base = OTHER; note = 2'-O-methyladenosine
  modified_base 3: mod_base = cm
  modified_base 4: mod_base = cm
  modified_base 5: mod_base = gm
  modified_base 6: mod_base = OTHER; note = 2'-O-methyladenosine
  modified_base 7: mod_base = cm
  modified_base 8: mod_base = OTHER; note = 2'-O-methyladenosine
  modified_base 9: mod_base = OTHER; note = 2'-fluorocytidine
  modified_base 10: mod_base = OTHER; note = 2'-O-methyladenosine
  modified_base 11: mod_base = OTHER; note = 2'-fluorouridine
  modified_base 12: mod_base = gm
  modified_base 13: mod_base = OTHER; note = 2'-fluorocytidine
  modified_base 14: mod_base = OTHER; note = 2'-O-methyladenosine
  modified_base 15: mod_base = OTHER; note = 2'-O-methyladenosine
  modified_base 16: mod_base = cm
  modified_base 17: mod_base = um
  modified_base 18: mod_base = um
  modified_base 19: mod_base = cm
  modified_base 20: mod_base = OTHER; note = 2'-O-methylinosine
  modified_base 21: mod_base = OTHER; note = 2'-O-methyladenosine
  source 1..21: mol_type = other RNA
caccgacacatgcaacttcna

SEQ ID NO: 1158 - RNA, 21 nt, synthetic construct
  modified_base 1: mod_base = gm
  modified_base 2: mod_base = OTHER; note = 2'-O-methyladenosine
  modified_base 3: mod_base = cm
  modified_base 4: mod_base = cm
  modified_base 5: mod_base = cm
  modified_base 6: mod_base = um
  modified_base 7: mod_base = OTHER; note = 2'-O-methyladenosine
  modified_base 8: mod_base = gm
  modified_base 9: mod_base = OTHER; note = 2'-fluoroadenosine
  modified_base 10: mod_base = OTHER; note = 2'-fluoroadenosine
  modified_base 11: mod_base = OTHER; note = 2'-fluorocytidine
  modified_base 12: mod_base = um
  modified_base 13: mod_base = gm
  modified_base 14: mod_base = um
  modified_base 15: mod_base = cm
  modified_base 16: mod_base = um
  modified_base 17: mod_base = um
  modified_base 18: mod_base = cm
  modified_base 19: mod_base = OTHER; note = 2'-O-methylinosine
  modified_base 20: mod_base = OTHER; note = 2'-O-methyladenosine
  modified_base 21: mod_base = OTHER; note = 2'-O-methyladenosine
  source 1..21: mol_type = other RNA
gaccctagaactgtcttcnaa

SEQ ID NO: 1159 - RNA, 21 nt, synthetic construct
  modified_base 1: mod_base = gm
  modified_base 2: mod_base = OTHER; note = 2'-O-methyladenosine
  modified_base 3: mod_base = OTHER; note = 2'-O-methyladenosine
  modified_base 4: mod_base = cm
  modified_base 5: mod_base = cm
  modified_base 6: mod_base = cm
  modified_base 7: mod_base = um
  modified_base 8: mod_base = OTHER; note = 2'-O-methyladenosine
  modified_base 9: mod_base = OTHER; note = 2'-fluoroguanosine
  modified_base 10: mod_base = OTHER; note = 2'-fluoroadenosine
  modified_base 11: mod_base = OTHER; note = 2'-fluoroadenosine
  modified_base 12: mod_base = cm
  modified_base 13: mod_base = um
  modified_base 14: mod_base = gm
  modified_base 15: mod_base = um
  modified_base 16: mod_base = cm
  modified_base 17: mod_base = um
  modified_base 18: mod_base = um
  modified_base 19: mod_base = cm
  modified_base 20: mod_base = OTHER; note = 2'-O-methylinosine
  modified_base 21: mod_base = OTHER; note = 2'-O-methyladenosine
  source 1..21: mol_type = other RNA
gaaccctagaactgtcttcna

SEQ ID NO: 1160 - RNA, 21 nt, synthetic construct
  modified_base 1: mod_base = um
  modified_base 2: mod_base = gm
  modified_base 3: mod_base = gm
  modified_base 4: mod_base = cm
  modified_base 5: mod_base = OTHER; note = 2'-O-methyladenosine
  modified_base 6: mod_base = OTHER; note = 2'-O-methyladenosine
  modified_base 7: mod_base = gm
  modified_base 8: mod_base = OTHER; note = 2'-O-methyladenosine
  modified_base 9: mod_base = OTHER; note = 2'-fluorouridine
  modified_base 10: mod_base = cm
  modified_base 11: mod_base = OTHER; note = 2'-fluoroguanosine
  modified_base 12: mod_base = OTHER; note = 2'-fluorouridine
  modified_base 13: mod_base = cm
  modified_base 14: mod_base = cm
  modified_base 15: mod_base = OTHER; note = 2'-O-methyladenosine
  modified_base 16: mod_base = cm
  modified_base 17: mod_base = um
  modified_base 18: mod_base = OTHER; note = 2'-O-methyladenosine
  modified_base 19: mod_base = cm
  modified_base 20: mod_base = OTHER; note = 2'-O-methyladenosine
  modified_base 21: mod_base = OTHER; note = 2'-O-methyladenosine
  source 1..21: mol_type = other RNA
tggcaagatcgtccactacaa

SEQ ID NO: 1161 - RNA, 21 nt, synthetic construct
  modified_base 1: mod_base = um
  modified_base 2: mod_base = gm
  modified_base 3: mod_base = gm
  modified_base 4: mod_base = cm
  modified_base 5: mod_base = OTHER; note = 2'-O-methyladenosine
  modified_base 6: mod_base = OTHER; note = 2'-O-methyladenosine
  modified_base 7: mod_base = gm
  modified_base 8: mod_base = OTHER; note = 2'-O-methyladenosine
  modified_base 9: mod_base = OTHER; note = 2'-fluorouridine
  modified_base 10: mod_base = cm
  modified_base 11: mod_base = OTHER; note = 2'-fluoroguanosine
  modified_base 12: mod_base = um
  modified_base 13: mod_base = OTHER; note = 2'-fluorocytidine
  modified_base 14: mod_base = cm
  modified_base 15: mod_base = OTHER; note = 2'-O-methyladenosine
  modified_base 16: mod_base = cm
  modified_base 17: mod_base = um
  modified_base 18: mod_base = OTHER; note = 2'-O-methyladenosine
  modified_base 19: mod_base = cm
  modified_base 20: mod_base = OTHER; note = 2'-O-methyladenosine
  modified_base 21: mod_base = OTHER; note = 2'-O-methyladenosine
  source 1..21: mol_type = other RNA
tggcaagatcgtccactacaa

SEQ ID NO: 1162 - RNA, 21 nt, synthetic construct
  modified_base 1: mod_base = cm
  modified_base 2: mod_base = cm
  modified_base 3: mod_base = um
  modified_base 4: mod_base = gm
  modified_base 5: mod_base = gm
  modified_base 6: mod_base = um
  modified_base 7: mod_base = cm
  modified_base 8: mod_base = OTHER; note = 2'-O-methyladenosine
  modified_base 9: mod_base = OTHER; note = 2'-fluorouridine
  modified_base 10: mod_base = gm
  modified_base 11: mod_base = OTHER; note = 2'-fluoroguanosine
  modified_base 12: mod_base = OTHER; note = 2'-fluoroadenosine
  modified_base 13: mod_base = gm
  modified_base 14: mod_base = um
  modified_base 15: mod_base = OTHER; note = 2'-O-methyladenosine
  modified_base 16: mod_base = um
  modified_base 17: mod_base = um
  modified_base 18: mod_base = OTHER; note = 2'-O-methyladenosine
  modified_base 19: mod_base = cm
  modified_base 20: mod_base = gm
  modified_base 21: mod_base = OTHER; note = 2'-O-methyladenosine
  source 1..21: mol_type = other RNA
cctggtcatggagtattacga

SEQ ID NO: 1163 - RNA, 19 nt, synthetic construct
  modified_base 1: mod_base = cm
  modified_base 1^2: mod_base = OTHER; note = phosphorothioate linkage
  modified_base 2: mod_base = cm
  modified_base 2^3: mod_base = OTHER; note = phosphorothioate linkage
  modified_base 3: mod_base = cm
  modified_base 4: mod_base = um
  modified_base 5: mod_base = OTHER; note = 2'-O-methyladenosine
  modified_base 6: mod_base = gm
  modified_base 7: mod_base = OTHER; note = 2'-fluoroadenosine
  modified_base 8: mod_base = OTHER; note = 2'-fluoroadenosine
  modified_base 9: mod_base = OTHER; note = 2'-fluorocytidine
  modified_base 10: mod_base = um
  modified_base 11: mod_base = gm
  modified_base 12: mod_base = um
  modified_base 13: mod_base = cm
  modified_base 14: mod_base = um
  modified_base 15: mod_base = um
  modified_base 16: mod_base = cm
  modified_base 17: mod_base = gm
  modified_base 17^18: mod_base = OTHER; note = phosphorothioate linkage
  modified_base 18: mod_base = OTHER; note = 2'-O-methyladenosine
  modified_base 18^19: mod_base = OTHER; note = phosphorothioate linkage
  modified_base 19: mod_base = OTHER; note = 2'-O-methyladenosine
  source 1..19: mol_type = other RNA
ccctagaactgtcttcgaa

SEQ ID NO: 1164 - RNA, 21 nt, synthetic construct
  modified_base 1: mod_base = cm
  modified_base 2: mod_base = cm
  modified_base 3: mod_base = um
  modified_base 4: mod_base = cm
  modified_base 5: mod_base = gm
  modified_base 6: mod_base = gm
  modified_base 7: mod_base = um
  modified_base 8: mod_base = OTHER; note = 2'-O-methyladenosine
  modified_base 9: mod_base = OTHER; note = 2'-fluorouridine
  modified_base 10: mod_base = um
  modified_base 11: mod_base = OTHER; note = 2'-fluorouridine
  modified_base 12: mod_base = OTHER; note = 2'-O-methyladenosine
  modified_base 13: mod_base = OTHER; note = 2'-fluorouridine
  modified_base 14: mod_base = um
  modified_base 15: mod_base = gm
  modified_base 16: mod_base = um
  modified_base 17: mod_base = cm
  modified_base 18: mod_base = um
  modified_base 19: mod_base = gm
  modified_base 20: mod_base = um
  modified_base 21: mod_base = OTHER; note = 2'-O-methyladenosine
  source 1..21: mol_type = other RNA
cctcggtatttattgtctgta

SEQ ID NO: 1165 - RNA, 21 nt, synthetic construct
  modified_base 1: mod_base = cm
  modified_base 2: mod_base = cm
  modified_base 3: mod_base = um
  modified_base 4: mod_base = cm
  modified_base 5: mod_base = gm
  modified_base 6: mod_base = gm
  modified_base 7: mod_base = um
  modified_base 8: mod_base = OTHER; note = 2'-O-methyladenosine
  modified_base 9: mod_base = OTHER; note = 2'-fluorouridine
  modified_base 10: mod_base = um
  modified_base 11: mod_base = OTHER; note = 2'-fluorouridine
  modified_base 12: mod_base = OTHER; note = 2'-fluoroadenosine
  modified_base 13: mod_base = um
  modified_base 14: mod_base = um
  modified_base 15: mod_base = gm
  modified_base 16: mod_base = um
  modified_base 17: mod_base = cm
  modified_base 18: mod_base = um
  modified_base 19: mod_base = gm
  modified_base 20: mod_base = um
  modified_base 21: mod_base = OTHER; note = 2'-O-methyladenosine
  source 1..21: mol_type = other RNA
cctcggtatttattgtctgta

SEQ ID NO: 1166 - RNA, 21 nt, synthetic construct
  modified_base 1: mod_base = um
  modified_base 2: mod_base = um
  modified_base 3: mod_base = cm
  modified_base 4: mod_base = cm
  modified_base 5: mod_base = um
  modified_base 6: mod_base = cm
  modified_base 7: mod_base = gm
  modified_base 8: mod_base = gm
  modified_base 9: mod_base = OTHER; note = 2'-fluorouridine
  modified_base 10: mod_base = OTHER; note = 2'-O-methyladenosine
  modified_base 11: mod_base = OTHER; note = 2'-fluorouridine
  modified_base 12: mod_base = OTHER; note = 2'-fluorouridine
  modified_base 13: mod_base = um
  modified_base 14: mod_base = OTHER; note = 2'-O-methyladenosine
  modified_base 15: mod_base = um
  modified_base 16: mod_base = um
  modified_base 17: mod_base = gm
  modified_base 18: mod_base = um
  modified_base 19: mod_base = cm
  modified_base 20: mod_base = um
  modified_base 21: mod_base = OTHER; note = 2'-O-methyladenosine
  source 1..21: mol_type = other RNA
ttcctcggtatttattgtcta

SEQ ID NO: 1167 - RNA, 21 nt, synthetic construct
  modified_base 1: mod_base = cm
  modified_base 2: mod_base = cm
  modified_base 3: mod_base = um
  modified_base 4: mod_base = gm
  modified_base 5: mod_base = gm
  modified_base 6: mod_base = um
  modified_base 7: mod_base = cm
  modified_base 8: mod_base = OTHER; note = 2'-O-methyladenosine
  modified_base 9: mod_base = OTHER; note = 2'-fluorouridine
  modified_base 10: mod_base = gm
  modified_base 11: mod_base = OTHER; note = 2'-fluoroguanosine
  modified_base 12: mod_base = OTHER; note = 2'-fluoroadenosine
  modified_base 13: mod_base = gm
  modified_base 14: mod_base = um
  modified_base 15: mod_base = OTHER; note = 2'-O-methyladenosine
  modified_base 16: mod_base = um
  modified_base 17: mod_base = um
  modified_base 18: mod_base = OTHER; note = 2'-O-methyladenosine
  modified_base 19: mod_base = cm
  modified_base 20: mod_base = gm
  modified_base 21: mod_base = OTHER; note = 2'-O-methyladenosine
  source 1..21: mol_type = other RNA
cctggtcatggagtattacga

SEQ ID NO: 1168 - RNA, 22 nt, synthetic construct
  modified_base 1: mod_base = um
  modified_base 2: mod_base = um
  modified_base 3: mod_base = cm
  modified_base 4: mod_base = cm
  modified_base 5: mod_base = um
  modified_base 6: mod_base = cm
  modified_base 7: mod_base = gm
  modified_base 8: mod_base = gm
  modified_base 9: mod_base = OTHER; note = 2'-fluorouridine
  modified_base 10: mod_base = OTHER; note = 2'-O-methyladenosine
  modified_base 11: mod_base = OTHER; note = 2'-fluorouridine
  modified_base 12: mod_base = OTHER; note = 2'-fluorouridine
  modified_base 13: mod_base = um
  modified_base 14: mod_base = OTHER; note = 2'-O-methyladenosine
  modified_base 15: mod_base = um
  modified_base 16: mod_base = um
  modified_base 17: mod_base = gm
  modified_base 18: mod_base = um
  modified_base 19: mod_base = cm
  modified_base 20: mod_base = um
  modified_base 21: mod_base = OTHER; note = 2'-O-propargyladenosine
  source 1..22: mol_type = other RNA
ttcctcggtatttattgtctaa

SEQ ID NO: 1169 - RNA, 22 nt, synthetic construct
  modified_base 1: mod_base = um
  modified_base 2: mod_base = um
  modified_base 3: mod_base = cm
  modified_base 4: mod_base = cm
  modified_base 5: mod_base = um
  modified_base 6: mod_base = cm
  modified_base 7: mod_base = gm
  modified_base 8: mod_base = gm
  modified_base 9: mod_base = OTHER; note = 2'-fluorouridine
  modified_base 10: mod_base = OTHER; note = 2'-O-methyladenosine
  modified_base 11: mod_base = OTHER; note = 2'-fluorouridine
  modified_base 12: mod_base = OTHER; note = 2'-fluorouridine
  modified_base 13: mod_base = um
  modified_base 14: mod_base = OTHER; note = 2'-O-methyladenosine
  modified_base 15: mod_base = um
  modified_base 16: mod_base = um
  modified_base 17: mod_base = gm
  modified_base 18: mod_base = um
  modified_base 19: mod_base = cm
  modified_base 20: mod_base = um
  modified_base 20^21: mod_base = OTHER; note = phosphorothioate linkage
  modified_base 21: mod_base = OTHER; note = 2'-O-propargyladenosine
  source 1..22: mol_type = other RNA
ttcctcggtatttattgtctaa

SEQ ID NO: 1170 - RNA, 21 nt, synthetic construct
  modified_base 1: mod_base = um
  modified_base 2: mod_base = um
  modified_base 3: mod_base = cm
  modified_base 4: mod_base = cm
  modified_base 5: mod_base = um
  modified_base 6: mod_base = cm
  modified_base 7: mod_base = gm
  modified_base 8: mod_base = gm
  modified_base 9: mod_base = OTHER; note = 2'-fluorouridine
  modified_base 10: mod_base = OTHER; note = 2'-O-methyladenosine
  modified_base 11: mod_base = OTHER; note = 2'-fluorouridine
  modified_base 12: mod_base = OTHER; note = 2'-fluorouridine
  modified_base 13: mod_base = um
  modified_base 14: mod_base = OTHER; note = 2'-O-methyladenosine
  modified_base 15: mod_base = um
  modified_base 16: mod_base = um
  modified_base 17: mod_base = gm
  modified_base 18: mod_base = um
  modified_base 19: mod_base = cm
  modified_base 20: mod_base = um
  modified_base 21: mod_base = OTHER; note = 2'-O-methyladenosine
  source 1..21: mol_type = other RNA
ttcctcggtatttattgtcta

SEQ ID NO: 1171 - RNA, 21 nt, synthetic construct
  modified_base 1: mod_base = cm
  modified_base 2: mod_base = cm
  modified_base 3: mod_base = um
  modified_base 4: mod_base = gm
  modified_base 5: mod_base = gm
  modified_base 6: mod_base = um
  modified_base 7: mod_base = cm
  modified_base 8: mod_base = OTHER; note = 2'-O-methyladenosine
  modified_base 9: mod_base = OTHER; note = 2'-fluorouridine
  modified_base 10: mod_base = gm
  modified_base 11: mod_base = OTHER; note = 2'-fluoroguanosine
  modified_base 12: mod_base = OTHER; note = 2'-fluoroadenosine
  modified_base 13: mod_base = gm
  modified_base 14: mod_base = um
  modified_base 15: mod_base = OTHER; note = 2'-O-methyladenosine
  modified_base 16: mod_base = um
  modified_base 17: mod_base = um
  modified_base 18: mod_base = OTHER; note = 2'-O-methyladenosine
  modified_base 19: mod_base = cm
  modified_base 20: mod_base = gm
  modified_base 21: mod_base = OTHER; note = 2'-O-methyladenosine
  source 1..21: mol_type = other RNA
cctggtcatggagtattacga

SEQ ID NO: 1172 - RNA, 22 nt, synthetic construct
  modified_base 1: mod_base = cm
  modified_base 2: mod_base = cm
  modified_base 3: mod_base = um
  modified_base 4: mod_base = gm
  modified_base 5: mod_base = gm
  modified_base 6: mod_base = gm
  modified_base 7: mod_base = um
  modified_base 8: mod_base = cm
  modified_base 9: mod_base = OTHER; note = 2'-O-methyladenosine
  modified_base 10: mod_base = OTHER; note = 2'-fluorouridine
  modified_base 11: mod_base = gm
  modified_base 12: mod_base = OTHER; note = 2'-fluoroguanosine
  modified_base 13: mod_base = OTHER; note = 2'-fluoroadenosine
  modified_base 14: mod_base = gm
  modified_base 15: mod_base = um
  modified_base 16: mod_base = OTHER; note = 2'-O-methyladenosine
  modified_base 17: mod_base = um
  modified_base 18: mod_base = um
  modified_base 19: mod_base = OTHER; note = 2'-O-methyladenosine
  modified_base 20: mod_base = cm
  modified_base 21: mod_base = gm
  modified_base 22: mod_base = OTHER; note = 2'-O-methyladenosine
  source 1..22: mol_type = other RNA
cctgggtcatggagtattacga

SEQ ID NO: 1173 - RNA, 21 nt, synthetic construct
  modified_base 1: mod_base = cm
  modified_base 2: mod_base = cm
  modified_base 3: mod_base = um
  modified_base 4: mod_base = gm
  modified_base 5: mod_base = gm
  modified_base 6: mod_base = um
  modified_base 7: mod_base = cm
  modified_base 8: mod_base = OTHER; note = 2'-O-methyladenosine
  modified_base 9: mod_base = OTHER; note = 2'-fluorouridine
  modified_base 10: mod_base = gm
  modified_base 11: mod_base = OTHER; note = 2'-fluoroguanosine
  modified_base 12: mod_base = OTHER; note = 2'-fluoroadenosine
  modified_base 13: mod_base = gm
  modified_base 14: mod_base = um
  modified_base 15: mod_base = OTHER; note = 2'-O-methyladenosine
  modified_base 16: mod_base = um
  modified_base 17: mod_base = um
  modified_base 18: mod_base = OTHER; note = 2'-O-methyladenosine
  modified_base 19: mod_base = cm
  modified_base 20: mod_base = gm
  modified_base 21: mod_base = OTHER; note = 2'-O-methyladenosine
  source 1..21: mol_type = other RNA
cctggtcatggagtattacga

SEQ ID NO: 1174 - RNA, 20 nt, synthetic construct
  modified_base 1: mod_base = cm
  modified_base 2: mod_base = um
  modified_base 3: mod_base = gm
  modified_base 4: mod_base = gm
  modified_base 5: mod_base = um
  modified_base 6: mod_base = cm
  modified_base 7: mod_base = OTHER; note = 2'-O-methyladenosine
  modified_base 8: mod_base = OTHER; note = 2'-fluorouridine
  modified_base 9: mod_base = gm
  modified_base 10: mod_base = OTHER; note = 2'-fluoroguanosine
  modified_base 11: mod_base = OTHER; note = 2'-fluoroadenosine
  modified_base 12: mod_base = gm
  modified_base 13: mod_base = um
  modified_base 14: mod_base = OTHER; note = 2'-O-methyladenosine
  modified_base 15: mod_base = um
  modified_base 16: mod_base = um
  modified_base 17: mod_base = OTHER; note = 2'-O-methyladenosine
  modified_base 18: mod_base = cm
  modified_base 19: mod_base = gm
  modified_base 20: mod_base = OTHER; note = 2'-O-methyladenosine
  source 1..20: mol_type = other RNA
ctggtcatggagtattacga

SEQ ID NO: 1175 - RNA, 21 nt, synthetic construct
  modified_base 1: mod_base = cm
  modified_base 1^2: mod_base = OTHER; note = phosphorothioate linkage
  modified_base 2: mod_base = cm
  modified_base 3: mod_base = um
  modified_base 4: mod_base = gm
  modified_base 5: mod_base = gm
  modified_base 6: mod_base = um
  modified_base 7: mod_base = cm
  modified_base 8: mod_base = OTHER; note = 2'-O-methyladenosine
  modified_base 9: mod_base = OTHER; note = 2'-fluorouridine
  modified_base 10: mod_base = gm
  modified_base 11: mod_base = OTHER; note = 2'-fluoroguanosine
  modified_base 12: mod_base = OTHER; note = 2'-fluoroadenosine
  modified_base 13: mod_base = gm
  modified_base 14: mod_base = um
  modified_base 15: mod_base = OTHER; note = 2'-O-methyladenosine
  modified_base 16: mod_base = um
  modified_base 17: mod_base = um
  modified_base 18: mod_base = OTHER; note = 2'-O-methyladenosine
  modified_base 19: mod_base = cm
  modified_base 20: mod_base = gm
  modified_base 21: mod_base = OTHER; note = 2'-O-methyladenosine
  source 1..21: mol_type = other RNA
cctggtcatggagtattacga

SEQ ID NO: 1176 - RNA, 21 nt, synthetic construct
  modified_base 1: mod_base = gm
  modified_base 2: mod_base = gm
  modified_base 3: mod_base = OTHER; note = 2'-O-methyladenosine
  modified_base 4: mod_base = um
  modified_base 5: mod_base = gm
  modified_base 6: mod_base = OTHER; note = 2'-O-methyladenosine
  modified_base 7: mod_base = OTHER; note = 2'-O-methyladenosine
  modified_base 8: mod_base = OTHER; note = 2'-O-methyladenosine
  modified_base 9: mod_base = OTHER; note = 2'-fluorocytidine
  modified_base 10: mod_base = OTHER; note = 2'-fluoroadenosine
  modified_base 11: mod_base = OTHER; note = 2'-fluoroguanosine
  modified_base 12: mod_base = cm
  modified_base 13: mod_base = um
  modified_base 14: mod_base = gm
  modified_base 15: mod_base = OTHER; note = 2'-O-methyladenosine
  modified_base 16: mod_base = OTHER; note = 2'-O-methyladenosine
  modified_base 17: mod_base = gm
  modified_base 18: mod_base = um
  modified_base 19: mod_base = OTHER; note = 2'-O-methylinosine
  modified_base 20: mod_base = gm
  modified_base 21: mod_base = OTHER; note = 2'-O-methyladenosine
  source 1..21: mol_type = other RNA
ggatgaaacagctgaagtnga

SEQ ID NO: 1177 - RNA, 21 nt, synthetic construct
  modified_base 1: mod_base = um
  modified_base 2: mod_base = cm
  modified_base 3: mod_base = cm
  modified_base 4: mod_base = cm
  modified_base 5: mod_base = um
  modified_base 6: mod_base = gm
  modified_base 7: mod_base = OTHER; note = 2'-O-methyladenosine
  modified_base 8: mod_base = OTHER; note = 2'-O-methyladenosine
  modified_base 9: mod_base = OTHER; note = 2'-fluorocytidine
  modified_base 10: mod_base = OTHER; note = 2'-fluorocytidine
  modified_base 11: mod_base = OTHER; note = 2'-fluorocytidine
  modified_base 12: mod_base = um
  modified_base 13: mod_base = OTHER; note = 2'-O-methyladenosine
  modified_base 14: mod_base = gm
  modified_base 15: mod_base = OTHER; note = 2'-O-methyladenosine
  modified_base 16: mod_base = OTHER; note = 2'-O-methyladenosine
  modified_base 17: mod_base = cm
  modified_base 18: mod_base = um
  modified_base 19: mod_base = gm
  modified_base 20: mod_base = um
  modified_base 21: mod_base = OTHER; note = 2'-O-methyladenosine
  source 1..21: mol_type = other RNA
tccctgaaccctagaactgta

SEQ ID NO: 1178 - RNA, 21 nt, synthetic construct
  modified_base 1: mod_base = gm
  modified_base 2: mod_base = OTHER; note = 2'-O-methyladenosine
  modified_base 3: mod_base = OTHER; note = 2'-O-methyladenosine
  modified_base 4: mod_base = cm
  modified_base 5: mod_base = cm
  modified_base 6: mod_base = cm
  modified_base 7: mod_base = um
  modified_base 8: mod_base = OTHER; note = 2'-O-methyladenosine
  modified_base 9: mod_base = OTHER; note = 2'-fluoroguanosine
  modified_base 10: mod_base = OTHER; note = 2'-fluoroadenosine
  modified_base 11: mod_base = OTHER; note = 2'-fluoroadenosine
  modified_base 12: mod_base = cm
  modified_base 13: mod_base = um
  modified_base 14: mod_base = gm
  modified_base 15: mod_base = um
  modified_base 16: mod_base = cm
  modified_base 17: mod_base = um
  modified_base 18: mod_base = um
  modified_base 19: mod_base = cm
  modified_base 20: mod_base = OTHER; note = 2'-O-methylinosine
  modified_base 21: mod_base = OTHER; note = 2'-O-methyladenosine
  source 1..21: mol_type = other RNA
gaaccctagaactgtcttcna

SEQ ID NO: 1179 - RNA, 21 nt, synthetic construct
  modified_base 1: mod_base = gm
  modified_base 2: mod_base = OTHER; note = 2'-O-methyladenosine
  modified_base 3: mod_base = cm
  modified_base 4: mod_base = cm
  modified_base 5: mod_base = cm
  modified_base 6: mod_base = um
  modified_base 7: mod_base = OTHER; note = 2'-O-methyladenosine
  modified_base 8: mod_base = gm
  modified_base 9: mod_base = OTHER; note = 2'-fluoroadenosine
  modified_base 10: mod_base = OTHER; note = 2'-fluoroadenosine
  modified_base 11: mod_base = OTHER; note = 2'-fluorocytidine
  modified_base 12: mod_base = um
  modified_base 13: mod_base = gm
  modified_base 14: mod_base = um
  modified_base 15: mod_base = cm
  modified_base 16: mod_base = um
  modified_base 17: mod_base = um
  modified_base 18: mod_base = cm
  modified_base 19: mod_base = OTHER; note = 2'-O-methylinosine
  modified_base 20: mod_base = OTHER; note = 2'-O-methyladenosine
  modified_base 21: mod_base = OTHER; note = 2'-O-methyladenosine
  source 1..21: mol_type = other RNA
gaccctagaactgtcttcnaa

SEQ ID NO: 1180 - RNA, 21 nt, synthetic construct
  modified_base 1: mod_base = OTHER; note = 2'-O-methyladenosine
  modified_base 2: mod_base = cm
  modified_base 3: mod_base = cm
  modified_base 4: mod_base = cm
  modified_base 5: mod_base = um
  modified_base 6: mod_base = OTHER; note = 2'-O-methyladenosine
  modified_base 7: mod_base = gm
  modified_base 8: mod_base = OTHER; note = 2'-O-methyladenosine
  modified_base 9: mod_base = OTHER; note = 2'-fluoroadenosine
  modified_base 10: mod_base = OTHER; note = 2'-fluorocytidine
  modified_base 11: mod_base = OTHER; note = 2'-fluorouridine
  modified_base 12: mod_base = gm
  modified_base 13: mod_base = um
  modified_base 14: mod_base = cm
  modified_base 15: mod_base = um
  modified_base 16: mod_base = um
  modified_base 17: mod_base = cm
  modified_base 18: mod_base = OTHER; note = 2'-O-methylinosine
  modified_base 19: mod_base = OTHER; note = 2'-O-methyladenosine
  modified_base 20: mod_base = cm
  modified_base 21: mod_base = um
  source 1..21: mol_type = other RNA
accctagaactgtcttcnact

SEQ ID NO: 1181 - RNA, 21 nt, synthetic construct
  modified_base 1: mod_base = cm
  modified_base 2: mod_base = cm
  modified_base 3: mod_base = cm
  modified_base 4: mod_base = um
  modified_base 5: mod_base = OTHER; note = 2'-O-methyladenosine
  modified_base 6: mod_base = gm
  modified_base 7: mod_base = OTHER; note = 2'-O-methyladenosine
  modified_base 8: mod_base = OTHER; note = 2'-O-methyladenosine
  modified_base 9: mod_base = OTHER; note = 2'-fluorocytidine
  modified_base 10: mod_base = OTHER; note = 2'-fluorouridine
  modified_base 11: mod_base = OTHER; note = 2'-fluoroguanosine
  modified_base 12: mod_base = um
  modified_base 13: mod_base = cm
  modified_base 14: mod_base = um
  modified_base 15: mod_base = um
  modified_base 16: mod_base = cm
  modified_base 17: mod_base = OTHER; note = 2'-O-methylinosine
  modified_base 18: mod_base = OTHER; note = 2'-O-methyladenosine
  modified_base 19: mod_base = cm
  modified_base 20: mod_base = um
  modified_base 21: mod_base = OTHER; note = 2'-O-methyladenosine
  source 1..21: mol_type = other RNA
ccctagaactgtcttcnacta

SEQ ID NO: 1182 - RNA, 21 nt, synthetic construct
  modified_base 1: mod_base = um
  modified_base 2: mod_base = gm
  modified_base 3: mod_base = cm
  modified_base 4: mod_base = um
  modified_base 5: mod_base = um
  modified_base 6: mod_base = OTHER; note = 2'-O-methyladenosine
  modified_base 7: mod_base = cm
  modified_base 8: mod_base = um
  modified_base 9: mod_base = OTHER; note = 2'-fluorocytidine
  modified_base 10: mod_base = OTHER; note = 2'-fluoroguanosine
  modified_base 11: mod_base = OTHER; note = 2'-fluoroguanosine
  modified_base 12: mod_base = gm
  modified_base 13: mod_base = OTHER; note = 2'-O-methyladenosine
  modified_base 14: mod_base = OTHER; note = 2'-O-methyladenosine
  modified_base 15: mod_base = OTHER; note = 2'-O-methyladenosine
  modified_base 16: mod_base = um
  modified_base 17: mod_base = um
  modified_base 18: mod_base = um
  modified_base 19: mod_base = gm
  modified_base 20: mod_base = cm
  modified_base 21: mod_base = um
  source 1..21: mol_type = other RNA
tgcttactcgggaaatttgct

SEQ ID NO: 1183 - RNA, 21 nt, synthetic construct
  modified_base 1: mod_base = cm
  modified_base 2: mod_base = gm
  modified_base 3: mod_base = gm
  modified_base 4: mod_base = gm
  modified_base 5: mod_base = OTHER; note = 2'-O-methyladenosine
  modified_base 6: mod_base = OTHER; note = 2'-O-methyladenosine
  modified_base 7: mod_base = OTHER; note = 2'-O-methyladenosine
  modified_base 8: mod_base = um
  modified_base 9: mod_base = OTHER; note = 2'-fluorouridine
  modified_base 10: mod_base = OTHER; note = 2'-fluorouridine
  modified_base 11: mod_base = OTHER; note = 2'-fluoroguanosine
  modified_base 12: mod_base = cm
  modified_base 13: mod_base = um
  modified_base 14: mod_base = um
  modified_base 15: mod_base = um
  modified_base 16: mod_base = um
  modified_base 17: mod_base = OTHER; note = 2'-O-methylinosine
  modified_base 18: mod_base = cm
  modified_base 19: mod_base = cm
  modified_base 20: mod_base = OTHER; note = 2'-O-methyladenosine
  modified_base 21: mod_base = OTHER; note = 2'-O-methyladenosine
  source 1..21: mol_type = other RNA
cgggaaatttgcttttnccaa

SEQ ID NO: 1184 - RNA, 21 nt, synthetic construct
  modified_base 1: mod_base = OTHER; note = 2'-O-methyladenosine
  modified_base 2: mod_base = cm
  modified_base 3: mod_base = cm
  modified_base 4: mod_base = cm
  modified_base 5: mod_base = cm
  modified_base 6: mod_base = OTHER; note = 2'-O-methyladenosine
  modified_base 7: mod_base = OTHER; note = 2'-O-methyladenosine
  modified_base 8: mod_base = um
  modified_base 9: mod_base = OTHER; note = 2'-fluorocytidine
  modified_base 10: mod_base = OTHER; note = 2'-fluorocytidine
  modified_base 11: mod_base = OTHER; note = 2'-fluoroadenosine
  modified_base 12: mod_base = cm
  modified_base 13: mod_base = gm
  modified_base 14: mod_base = um
  modified_base 15: mod_base = um
  modified_base 16: mod_base = um
  modified_base 17: mod_base = um
  modified_base 18: mod_base = gm
  modified_base 19: mod_base = gm
  modified_base 20: mod_base = OTHER; note = 2'-O-methyladenosine
  modified_base 21: mod_base = um
  source 1..21: mol_type = other RNA
accccaatccacgttttggat

SEQ ID NO: 1185 - RNA, 21 nt, synthetic construct
  modified_base 1: mod_base = cm
  modified_base 2: mod_base = cm
  modified_base 3: mod_base = cm
  modified_base 4: mod_base = OTHER; note = 2'-O-methyladenosine
  modified_base 5: mod_base = OTHER; note = 2'-O-methyladenosine
  modified_base 6: mod_base = um
  modified_base 7: mod_base = cm
  modified_base 8: mod_base = cm
  modified_base 9: mod_base = OTHER; note = 2'-fluoroadenosine
  modified_base 10: mod_base = OTHER; note = 2'-fluorocytidine
  modified_base 11: mod_base = OTHER; note = 2'-fluoroguanosine
  modified_base 12: mod_base = um
  modified_base 13: mod_base = um
  modified_base 14: mod_base = um
  modified_base 15: mod_base = um
  modified_base 16: mod_base = gm
  modified_base 17: mod_base = OTHER; note = 2'-O-methylinosine
  modified_base 18: mod_base = OTHER; note = 2'-O-methyladenosine
  modified_base 19: mod_base = um
  modified_base 20: mod_base = gm
  modified_base 21: mod_base = OTHER; note = 2'-O-methyladenosine
  source 1..21: mol_type = other RNA
cccaatccacgttttgnatga

SEQ ID NO: 1186 - RNA, 21 nt, synthetic construct
  modified_base 1: mod_base = gm
  modified_base 2: mod_base = OTHER; note = 2'-O-methyladenosine
  modified_base 3: mod_base = gm
  modified_base 4: mod_base = gm
  modified_base 5: mod_base = gm
  modified_base 6: mod_base = OTHER; note = 2'-O-methyladenosine
  modified_base 7: mod_base = cm
  modified_base 8: mod_base = gm
  modified_base 9: mod_base = OTHER; note = 2'-fluorouridine
  modified_base 10: mod_base = OTHER; note = 2'-fluoroguanosine
  modified_base 11: mod_base = OTHER; note = 2'-fluorouridine
  modified_base 12: mod_base = um
  modified_base 13: mod_base = gm
  modified_base 14: mod_base = gm
  modified_base 15: mod_base = um
  modified_base 16: mod_base = OTHER; note = 2'-O-methylinosine
  modified_base 17: mod_base = OTHER; note = 2'-O-methyladenosine
  modified_base 18: mod_base = OTHER; note = 2'-O-methyladenosine
  modified_base 19: mod_base = um
  modified_base 20: mod_base = gm
  modified_base 21: mod_base = OTHER; note = 2'-O-methyladenosine
  source 1..21: mol_type = other RNA
gagggacgtgttggtnaatga

SEQ ID NO: 1187 - RNA, 21 nt, synthetic construct
  modified_base 1: mod_base = gm
  modified_base 2: mod_base = gm
  modified_base 3: mod_base = OTHER; note = 2'-O-methyladenosine
  modified_base 4: mod_base = um
  modified_base 5: mod_base = gm
  modified_base 6: mod_base = OTHER; note = 2'-O-methyladenosine
  modified_base 7: mod_base = gm
  modified_base 8: mod_base = OTHER; note = 2'-O-methyladenosine
  modified_base 9: mod_base = OTHER; note = 2'-fluoroadenosine
  modified_base 10: mod_base = OTHER; note = 2'-fluorocytidine
  modified_base 11: mod_base = OTHER; note = 2'-fluorouridine
  modified_base 12: mod_base = OTHER; note = 2'-O-methyladenosine
  modified_base 13: mod_base = cm
  modified_base 14: mod_base = cm
  modified_base 15: mod_base = um
  modified_base 16: mod_base = OTHER; note = 2'-O-methylinosine
  modified_base 17: mod_base = um
  modified_base 18: mod_base = OTHER; note = 2'-O-methyladenosine
  modified_base 19: mod_base = cm
  modified_base 20: mod_base = cm
  modified_base 21: mod_base = um
  source 1..21: mol_type = other RNA
ggatgagaactacctntacct

SEQ ID NO: 1188 - RNA, 21 nt, synthetic construct
  modified_base 1: mod_base = cm
  modified_base 2: mod_base = cm
  modified_base 3: mod_base = um
  modified_base 4: mod_base = gm
  modified_base 5: mod_base = gm
  modified_base 6: mod_base = um
  modified_base 7: mod_base = cm
  modified_base 8: mod_base = OTHER; note = 2'-O-methyladenosine
  modified_base 9: mod_base = OTHER; note = 2'-fluorouridine
  modified_base 10: mod_base = OTHER; note = 2'-fluoroguanosine
  modified_base 11: mod_base = OTHER; note = 2'-fluoroguanosine
  modified_base 12: mod_base = OTHER; note = 2'-O-methyladenosine
  modified_base 13: mod_base = gm
  modified_base 14: mod_base = um
  modified_base 15: mod_base = OTHER; note = 2'-O-methyladenosine
  modified_base 16: mod_base = um
  modified_base 17: mod_base = um
  modified_base 18: mod_base = OTHER; note = 2'-O-methyladenosine
  modified_base 19: mod_base = cm
  modified_base 20: mod_base = gm
  modified_base 21: mod_base = um
  source 1..21: mol_type = other RNA
cctggtcatggagtattacgt

SEQ ID NO: 1189 - RNA, 21 nt, synthetic construct
  modified_base 1: mod_base = gm
  modified_base 2: mod_base = gm
  modified_base 3: mod_base = OTHER; note = 2'-O-methyladenosine
  modified_base 4: mod_base = cm
  modified_base 5: mod_base = OTHER; note = 2'-O-methyladenosine
  modified_base 6: mod_base = um
  modified_base 7: mod_base = cm
  modified_base 8: mod_base = OTHER; note = 2'-O-methyladenosine
  modified_base 9: mod_base = OTHER; note = 2'-fluoroadenosine
  modified_base 10: mod_base = OTHER; note = 2'-fluoroadenosine
  modified_base 11: mod_base = OTHER; note = 2'-fluorocytidine
  modified_base 12: mod_base = cm
  modified_base 13: mod_base = cm
  modified_base 14: mod_base = gm
  modified_base 15: mod_base = OTHER; note = 2'-O-methyladenosine
  modified_base 16: mod_base = cm
  modified_base 17: mod_base = OTHER; note = 2'-O-methyladenosine
  modified_base 18: mod_base = OTHER; note = 2'-O-methyladenosine
  modified_base 19: mod_base = cm
  modified_base 20: mod_base = OTHER; note = 2'-O-methyladenosine
  modified_base 21: mod_base = um
  source 1..21: mol_type = other RNA
ggacatcaaacccgacaacat

SEQ ID NO: 1190 - RNA, 21 nt, synthetic construct
  modified_base 1: mod_base = gm
  modified_base 2: mod_base = gm
  modified_base 3: mod_base = OTHER; note = 2'-O-methyladenosine
  modified_base 4: mod_base = cm
  modified_base 5: mod_base = OTHER; note = 2'-O-methyladenosine
  modified_base 6: mod_base = um
  modified_base 7: mod_base = cm
  modified_base 8: mod_base = OTHER; note = 2'-O-methyladenosine
  modified_base 9: mod_base = OTHER; note = 2'-fluoroadenosine
  modified_base 10: mod_base = OTHER; note = 2'-fluoroadenosine
  modified_base 11: mod_base = OTHER; note = 2'-fluorocytidine
  modified_base 12: mod_base = cm
  modified_base 13: mod_base = cm
  modified_base 14: mod_base = gm
  modified_base 15: mod_base = OTHER; note = 2'-O-methyladenosine
  modified_base 16: mod_base = um
  modified_base 17: mod_base = OTHER; note = 2'-O-methyladenosine
  modified_base 18: mod_base = OTHER; note = 2'-O-methyladenosine
  modified_base 19: mod_base = cm
  modified_base 20: mod_base = OTHER; note = 2'-O-methyladenosine
  modified_base 21: mod_base = um
  source 1..21: mol_type = other RNA
ggacatcaaacccgataacat

SEQ ID NO: 1191 - RNA, 21 nt, synthetic construct
  modified_base 1: mod_base = um
  modified_base 2: mod_base = gm
  modified_base 3: mod_base = gm
  modified_base 4: mod_base = cm
  modified_base 5: mod_base = OTHER; note = 2'-O-methyladenosine
  modified_base 6: mod_base = OTHER; note = 2'-O-methyladenosine
  modified_base 7: mod_base = gm
  modified_base 8: mod_base = OTHER; note = 2'-O-methyladenosine
  modified_base 9: mod_base = OTHER; note = 2'-fluorouridine
  modified_base 10: mod_base = OTHER; note = 2'-fluorocytidine
  modified_base 11: mod_base = OTHER; note = 2'-fluoroguanosine
  modified_base 12: mod_base = um
  modified_base 13: mod_base = cm
  modified_base 14: mod_base = cm
  modified_base 15: mod_base = OTHER; note = 2'-O-methyladenosine
  modified_base 16: mod_base = cm
  modified_base 17: mod_base = um
  modified_base 18: mod_base = OTHER; note = 2'-O-methyladenosine
  modified_base 19: mod_base = cm
  modified_base 20: mod_base = OTHER; note = 2'-O-methyladenosine
  modified_base 21: mod_base = OTHER; note = 2'-O-methyladenosine
  source 1..21: mol_type = other RNA
tggcaagatcgtccactacaa

SEQ ID NO: 1192 - RNA, 21 nt, synthetic construct
  modified_base 1: mod_base = um
  modified_base 2: mod_base = gm
  modified_base 3: mod_base = gm
  modified_base 4: mod_base = cm
  modified_base 5: mod_base = OTHER; note = 2'-O-methyladenosine
  modified_base 6: mod_base = OTHER; note = 2'-O-methyladenosine
  modified_base 7: mod_base = gm
  modified_base 8: mod_base = OTHER; note = 2'-O-methyladenosine
  modified_base 9: mod_base = OTHER; note = 2'-fluorouridine
  modified_base 10: mod_base = OTHER; note = 2'-fluorocytidine
  modified_base 11: mod_base = OTHER; note = 2'-fluoroguanosine
  modified_base 12: mod_base = um
  modified_base 13: mod_base = cm
  modified_base 14: mod_base = cm
  modified_base 15: mod_base = OTHER; note = 2'-O-methyladenosine
  modified_base 16: mod_base = um
  modified_base 17: mod_base = um
  modified_base 18: mod_base = OTHER; note = 2'-O-methyladenosine
  modified_base 19: mod_base = cm
  modified_base 20: mod_base = OTHER; note = 2'-O-methyladenosine
  modified_base 21: mod_base = OTHER; note = 2'-O-methyladenosine
  source 1..21: mol_type = other RNA
tggcaagatcgtccattacaa

SEQ ID NO: 1193 - RNA, 21 nt, synthetic construct
  modified_base 1: mod_base = cm
  modified_base 2: mod_base = cm
  modified_base 3: mod_base = cm
  modified_base 4: mod_base = cm
  modified_base 5: mod_base = um
  modified_base 6: mod_base = um
  modified_base 7: mod_base = um
  modified_base 8: mod_base = OTHER; note = 2'-O-methyladenosine
  modified_base 9: mod_base = OTHER; note = 2'-fluorocytidine
  modified_base 10: mod_base = OTHER; note = 2'-fluoroadenosine
  modified_base 11: mod_base = OTHER; note = 2'-fluorocytidine
  modified_base 12: mod_base = cm
  modified_base 13: mod_base = gm
  modified_base 14: mod_base = gm
  modified_base 15: mod_base = OTHER; note = 2'-O-methyladenosine
  modified_base 16: mod_base = um
  modified_base 17: mod_base = um
  modified_base 18: mod_base = um
  modified_base 19: mod_base = cm
  modified_base 20: mod_base = gm
  modified_base 21: mod_base = OTHER; note = 2'-O-methyladenosine
  source 1..21: mol_type = other RNA
cccctttacaccggatttcga

SEQ ID NO: 1194 - RNA, 21 nt, synthetic construct
  modified_base 1: mod_base = cm
  modified_base 2: mod_base = gm
  modified_base 3: mod_base = OTHER; note = 2'-O-methyladenosine
  modified_base 4: mod_base = cm
  modified_base 5: mod_base = OTHER; note = 2'-O-methyladenosine
  modified_base 6: mod_base = cm
  modified_base 7: mod_base = OTHER; note = 2'-O-methyladenosine
  modified_base 8: mod_base = um
  modified_base 9: mod_base = OTHER; note = 2'-fluoroguanosine
  modified_base 10: mod_base = OTHER; note = 2'-fluorocytidine
  modified_base 11: mod_base = OTHER; note = 2'-fluoroadenosine
  modified_base 12: mod_base = OTHER; note = 2'-O-methyladenosine
  modified_base 13: mod_base = cm
  modified_base 14: mod_base = um
  modified_base 15: mod_base = um
  modified_base 16: mod_base = cm
  modified_base 17: mod_base = OTHER; note = 2'-O-methylinosine
  modified_base 18: mod_base = OTHER; note = 2'-O-methyladenosine
  modified_base 19: mod_base = cm
  modified_base 20: mod_base = um
  modified_base 21: mod_base = um
  source 1..21: mol_type = other RNA
cgacacatgcaacttcnactt

SEQ ID NO: 1195 - RNA, 21 nt, synthetic construct
  modified_base 1: mod_base = gm
  modified_base 2: mod_base = gm
  modified_base 3: mod_base = OTHER; note = 2'-O-methyladenosine
  modified_base 4: mod_base = OTHER; note = 2'-O-methyladenosine
  modified_base 5: mod_base = cm
  modified_base 6: mod_base = cm
  modified_base 7: mod_base = cm
  modified_base 8: mod_base = um
  modified_base 9: mod_base = OTHER; note = 2'-fluoroadenosine
  modified_base 10: mod_base = OTHER; note = 2'-fluoroguanosine
  modified_base 11: mod_base = OTHER; note = 2'-fluoroadenosine
  modified_base 12: mod_base = OTHER; note = 2'-O-methyladenosine
  modified_base 13: mod_base = cm
  modified_base 14: mod_base = um
  modified_base 15: mod_base = gm
  modified_base 16: mod_base = um
  modified_base 17: mod_base = cm
  modified_base 18: mod_base = um
  modified_base 19: mod_base = um
  modified_base 20: mod_base = cm
  modified_base 21: mod_base = OTHER; note = 2'-O-methyladenosine
  source 1..21: mol_type = other RNA
ggaaccctagaactgtcttca

SEQ ID NO: 1196 - RNA, 21 nt, synthetic construct
  modified_base 1: mod_base = gm
  modified_base 2: mod_base = gm
  modified_base 3: mod_base = OTHER; note = 2'-O-methyladenosine
  modified_base 4: mod_base = OTHER; note = 2'-O-methyladenosine
  modified_base 5: mod_base = cm
  modified_base 6: mod_base = cm
  modified_base 7: mod_base = cm
  modified_base 8: mod_base = um
  modified_base 9: mod_base = OTHER; note = 2'-fluoroadenosine
  modified_base 10: mod_base = OTHER; note = 2'-fluoroguanosine
  modified_base 11: mod_base = OTHER; note = 2'-fluoroadenosine
  modified_base 12: mod_base = OTHER; note = 2'-O-methyladenosine
  modified_base 13: mod_base = cm
  modified_base 14: mod_base = um
  modified_base 15: mod_base = gm
  modified_base 16: mod_base = um
  modified_base 17: mod_base = um
  modified_base 18: mod_base = um
  modified_base 19: mod_base = um
  modified_base 20: mod_base = cm
  modified_base 21: mod_base = OTHER; note = 2'-O-methyladenosine
  source 1..21: mol_type = other RNA
ggaaccctagaactgttttca

SEQ ID NO: 1197 - RNA, 21 nt, synthetic construct
  modified_base 1: mod_base = cm
  modified_base 2: mod_base = um
  modified_base 3: mod_base = gm
  modified_base 4: mod_base = cm
  modified_base 5: mod_base = um
  modified_base 6: mod_base = um
  modified_base 7: mod_base = OTHER; note = 2'-O-methyladenosine
  modified_base 8: mod_base = cm
  modified_base 9: mod_base = OTHER; note = 2'-fluorouridine
  modified_base 10: mod_base = OTHER; note = 2'-fluorocytidine
  modified_base 11: mod_base = OTHER; note = 2'-fluoroguanosine
  modified_base 12: mod_base = gm
  modified_base 13: mod_base = gm
  modified_base 14: mod_base = OTHER; note = 2'-O-methyladenosine
  modified_base 15: mod_base = OTHER; note = 2'-O-methyladenosine
  modified_base 16: mod_base = OTHER; note = 2'-O-methyladenosine
  modified_base 17: mod_base = um
  modified_base 18: mod_base = um
  modified_base 19: mod_base = um
  modified_base 20: mod_base = gm
  modified_base 21: mod_base = OTHER; note = 2'-O-methyladenosine
  source 1..21: mol_type = other RNA
ctgcttactcgggaaatttga

SEQ ID NO: 1198 - RNA, 21 nt, synthetic construct
  modified_base 1: mod_base = gm
  modified_base 2: mod_base = cm
  modified_base 3: mod_base = gm
  modified_base 4: mod_base = gm
  modified_base 5: mod_base = um
  modified_base 6: mod_base = um
  modified_base 7: mod_base = um
  modified_base 8: mod_base = gm
  modified_base 9: mod_base = OTHER; note = 2'-fluoroguanosine
  modified_base 10: mod_base = OTHER; note = 2'-O-methyl-2-aminoadenosine
  modified_base 11: mod_base = OTHER; note = 2'-fluorouridine
  modified_base 12: mod_base = OTHER; note = 2'-O-methyladenosine
  modified_base 13: mod_base = OTHER; note = 2'-fluorouridine
  modified_base 14: mod_base = um
  modified_base 15: mod_base = um
  modified_base 16: mod_base = OTHER; note = 2'-O-methyladenosine
  modified_base 17: mod_base = um
  modified_base 18: mod_base = um
  modified_base 19: mod_base = gm
  modified_base 20: mod_base = OTHER; note = 2'-O-methyladenosine
  modified_base 21: mod_base = OTHER; note = 2'-O-methyladenosine
  source 1..21: mol_type = other RNA
gcggtttggntatttattgaa

SEQ ID NO: 1199 - RNA, 21 nt, synthetic construct
  modified_base 1: mod_base = gm
  modified_base 2: mod_base = cm
  modified_base 3: mod_base = OTHER; note = 2'-O-methyladenosine
  modified_base 4: mod_base = um
  modified_base 5: mod_base = um
  modified_base 6: mod_base = cm
  modified_base 7: mod_base = cm
  modified_base 8: mod_base = um
  modified_base 9: mod_base = OTHER; note = 2'-fluorocytidine
  modified_base 10: mod_base = OTHER; note = 2'-fluoroguanosine
  modified_base 11: mod_base = OTHER; note = 2'-fluoroguanosine
  modified_base 12: mod_base = um
  modified_base 13: mod_base = OTHER; note = 2'-O-methyladenosine
  modified_base 14: mod_base = um
  modified_base 15: mod_base = um
  modified_base 16: mod_base = um
  modified_base 17: mod_base = OTHER; note = 2'-O-methyladenosine
  modified_base 18: mod_base = um
  modified_base 19: mod_base = um
  modified_base 20: mod_base = gm
  modified_base 21: mod_base = um
  source 1..21: mol_type = other RNA
gcattcctcggtatttattgt

SEQ ID NO: 1200 - RNA, 21 nt, synthetic construct
  modified_base 1: mod_base = gm
  modified_base 2: mod_base = cm
  modified_base 3: mod_base = OTHER; note = 2'-O-methyladenosine
  modified_base 4: mod_base = um
  modified_base 5: mod_base = um
  modified_base 6: mod_base = cm
  modified_base 7: mod_base = cm
  modified_base 8: mod_base = um
  modified_base 9: mod_base = OTHER; note = 2'-fluorocytidine
  modified_base 10: mod_base = OTHER; note = 2'-fluoroguanosine
  modified_base 11: mod_base = OTHER; note = 2'-fluoroguanosine
  modified_base 12: mod_base = um
  modified_base 13: mod_base = OTHER; note = 2'-O-methyladenosine
  modified_base 14: mod_base = um
  modified_base 15: mod_base = um
  modified_base 16: mod_base = um
  modified_base 17: mod_base = OTHER; note = 2'-O-methyl-2-aminoadenosine
  modified_base 18: mod_base = um
  modified_base 19: mod_base = um
  modified_base 20: mod_base = gm
  modified_base 21: mod_base = um
  source 1..21: mol_type = other RNA
gcattcctcggtatttnttgt

SEQ ID NO: 1201 - RNA, 21 nt, synthetic construct
  modified_base 1: mod_base = gm
  modified_base 2: mod_base = OTHER; note = 2'-O-methyladenosine
  modified_base 3: mod_base = cm
  modified_base 4: mod_base = cm
  modified_base 5: mod_base = cm
  modified_base 6: mod_base = um
  modified_base 7: mod_base = cm
  modified_base 8: mod_base = gm
  modified_base 9: mod_base = OTHER; note = 2'-fluorocytidine
  modified_base 10: mod_base = OTHER; note = 2'-fluoroguanosine
  modified_base 11: mod_base = OTHER; note = 2'-fluoroadenosine
  modified_base 12: mod_base = OTHER; note = 2'-O-methyladenosine
  modified_base 13: mod_base = um
  modified_base 14: mod_base = OTHER; note = 2'-O-methyladenosine
  modified_base 15: mod_base = OTHER; note = 2'-O-methyladenosine
  modified_base 16: mod_base = OTHER; note = 2'-O-methyladenosine
  modified_base 17: mod_base = OTHER; note = 2'-O-methyladenosine
  modified_base 18: mod_base = gm
  modified_base 19: mod_base = OTHER; note = 2'-O-methylinosine
  modified_base 20: mod_base = cm
  modified_base 21: mod_base = OTHER; note = 2'-O-methyladenosine
  source 1..21: mol_type = other RNA
gaccctcgcgaataaaagnca

SEQ ID NO: 1202 - RNA, 21 nt, synthetic construct
  modified_base 1: mod_base = OTHER; note = 2'-O-methyladenosine
  modified_base 2: mod_base = gm
  modified_base 3: mod_base = gm
  modified_base 4: mod_base = gm
  modified_base 5: mod_base = gm
  modified_base 6: mod_base = cm
  modified_base 7: mod_base = gm
  modified_base 8: mod_base = OTHER; note = 2'-O-methyladenosine
  modified_base 9: mod_base = OTHER; note = 2'-fluoroguanosine
  modified_base 10: mod_base = OTHER; note = 2'-fluoroguanosine
  modified_base 11: mod_base = OTHER; note = 2'-fluorouridine
  modified_base 12: mod_base = gm
  modified_base 13: mod_base = um
  modified_base 14: mod_base = cm
  modified_base 15: mod_base = gm
  modified_base 16: mod_base = um
  modified_base 17: mod_base = gm
  modified_base 18: mod_base = cm
  modified_base 19: mod_base = um
  modified_base 20: mod_base = um
  modified_base 21: mod_base = OTHER; note = 2'-O-methyladenosine
  source 1..21: mol_type = other RNA
aggggcgaggtgtcgtgctta

SEQ ID NO: 1203 - RNA, 21 nt, synthetic construct
  modified_base 1: mod_base = gm
  modified_base 2: mod_base = gm
  modified_base 3: mod_base = cm
  modified_base 4: mod_base = OTHER; note = 2'-O-methyladenosine
  modified_base 5: mod_base = gm
  modified_base 6: mod_base = OTHER; note = 2'-O-methyladenosine
  modified_base 7: mod_base = cm
  modified_base 8: mod_base = gm
  modified_base 9: mod_base = OTHER; note = 2'-fluorocytidine
  modified_base 10: mod_base = OTHER; note = 2'-fluorocytidine
  modified_base 11: mod_base = OTHER; note = 2'-fluorocytidine
  modified_base 12: mod_base = um
  modified_base 13: mod_base = um
  modified_base 14: mod_base = cm
  modified_base 15: mod_base = um
  modified_base 16: mod_base = OTHER; note = 2'-O-methyladenosine
  modified_base 17: mod_base = cm
  modified_base 18: mod_base = gm
  modified_base 19: mod_base = cm
  modified_base 20: mod_base = gm
  modified_base 21: mod_base = OTHER; note = 2'-O-methyladenosine
  source 1..21: mol_type = other RNA
ggcagacgcccttctacgcga

SEQ ID NO: 1204 - RNA, 21 nt, synthetic construct
  modified_base 1: mod_base = gm
  modified_base 2: mod_base = gm
  modified_base 3: mod_base = cm
  modified_base 4: mod_base = OTHER; note = 2'-O-methyladenosine
  modified_base 5: mod_base = gm
  modified_base 6: mod_base = OTHER; note = 2'-O-methyladenosine
  modified_base 7: mod_base = cm
  modified_base 8: mod_base = cm
  modified_base 9: mod_base = OTHER; note = 2'-fluorocytidine
  modified_base 10: mod_base = OTHER; note = 2'-fluorocytidine
  modified_base 11: mod_base = OTHER; note = 2'-fluorocytidine
  modified_base 12: mod_base = um
  modified_base 13: mod_base = um
  modified_base 14: mod_base = cm
  modified_base 15: mod_base = um
  modified_base 16: mod_base = OTHER; note = 2'-O-methyladenosine
  modified_base 17: mod_base = cm
  modified_base 18: mod_base = gm
  modified_base 19: mod_base = cm
  modified_base 20: mod_base = gm
  modified_base 21: mod_base = OTHER; note = 2'-O-methyladenosine
  source 1..21: mol_type = other RNA
ggcagacccccttctacgcga

SEQ ID NO: 1205 - RNA, 21 nt, synthetic construct
  modified_base 1: mod_base = cm
  modified_base 2: mod_base = cm
  modified_base 3: mod_base = cm
  modified_base 4: mod_base = cm
  modified_base 5: mod_base = gm
  modified_base 6: mod_base = OTHER; note = 2'-O-methyladenosine
  modified_base 7: mod_base = cm
  modified_base 8: mod_base = OTHER; note = 2'-O-methyladenosine
  modified_base 9: mod_base = OTHER; note = 2'-fluorouridine
  modified_base 10: mod_base = OTHER; note = 2'-fluorouridine
  modified_base 11: mod_base = OTHER; note = 2'-fluorocytidine
  modified_base 12: mod_base = cm
  modified_base 13: mod_base = um
  modified_base 14: mod_base = cm
  modified_base 15: mod_base = gm
  modified_base 16: mod_base = gm
  modified_base 17: mod_base = um
  modified_base 18: mod_base = OTHER; note = 2'-O-methyladenosine
  modified_base 19: mod_base = um
  modified_base 20: mod_base = um
  modified_base 21: mod_base = OTHER; note = 2'-O-methyladenosine
  source 1..21: mol_type = other RNA
ccccgacattcctcggtatta

SEQ ID NO: 1206 - RNA, 21 nt, synthetic construct
  modified_base 1: mod_base = um
  modified_base 2: mod_base = um
  modified_base 3: mod_base = cm
  modified_base 4: mod_base = cm
  modified_base 5: mod_base = um
  modified_base 6: mod_base = cm
  modified_base 7: mod_base = gm
  modified_base 8: mod_base = gm
  modified_base 9: mod_base = OTHER; note = 2'-fluorouridine
  modified_base 10: mod_base = OTHER; note = 2'-fluoroadenosine
  modified_base 11: mod_base = OTHER; note = 2'-fluorouridine
  modified_base 12: mod_base = um
  modified_base 13: mod_base = um
  modified_base 14: mod_base = OTHER; note = 2'-O-methyladenosine
  modified_base 15: mod_base = um
  modified_base 16: mod_base = um
  modified_base 17: mod_base = gm
  modified_base 18: mod_base = um
  modified_base 19: mod_base = cm
  modified_base 20: mod_base = um
  modified_base 21: mod_base = OTHER; note = 2'-O-methyladenosine
  source 1..21: mol_type = other RNA
ttcctcggtatttattgtcta

SEQ ID NO: 1207 - RNA, 21 nt, synthetic construct
  modified_base 1: mod_base = gm
  modified_base 2: mod_base = cm
  modified_base 3: mod_base = gm
  modified_base 4: mod_base = OTHER; note = 2'-O-methyladenosine
  modified_base 5: mod_base = gm
  modified_base 6: mod_base = gm
  modified_base 7: mod_base = OTHER; note = 2'-fluorouridine
  modified_base 8: mod_base = OTHER; note = 2'-fluoroadenosine
  modified_base 9: mod_base = OTHER; note = 2'-fluoroguanosine
  modified_base 10: mod_base = cm
  modified_base 11: mod_base = gm
  modified_base 12: mod_base = gm
  modified_base 13: mod_base = um
  modified_base 14: mod_base = OTHER; note = 2'-O-methyladenosine
  modified_base 15: mod_base = gm
  modified_base 16: mod_base = um
  modified_base 17: mod_base = gm
  modified_base 18: mod_base = OTHER; note = 2'-O-methyladenosine
  modified_base 19: mod_base = OTHER; note = 2'-O-methyladenosine
  modified_base 20: mod_base = OTHER; note = 2'-deoxythymidine
  modified_base 21: mod_base = OTHER; note = 2'-deoxythymidine
  source 1..21: mol_type = other RNA
gcgaggtagcggtagtgaatt

SEQ ID NO: 1208 - RNA, 21 nt, synthetic construct
  modified_base 1: mod_base = gm
  modified_base 2: mod_base = cm
  modified_base 3: mod_base = OTHER; note = 2'-O-methyladenosine
  modified_base 4: mod_base = cm
  modified_base 5: mod_base = um
  modified_base 6: mod_base = um
  modified_base 7: mod_base = OTHER; note = 2'-fluorocytidine
  modified_base 8: mod_base = OTHER; note = 2'-fluoroguanosine
  modified_base 9: mod_base = OTHER; note = 2'-fluorocytidine
  modified_base 10: mod_base = cm
  modified_base 11: mod_base = um
  modified_base 12: mod_base = um
  modified_base 13: mod_base = cm
  modified_base 14: mod_base = cm
  modified_base 15: mod_base = OTHER; note = 2'-O-methyladenosine
  modified_base 16: mod_base = gm
  modified_base 17: mod_base = gm
  modified_base 18: mod_base = OTHER; note = 2'-O-methyladenosine
  modified_base 19: mod_base = um
  modified_base 20: mod_base = OTHER; note = 2'-deoxythymidine
  modified_base 21: mod_base = OTHER; note = 2'-deoxythymidine
  source 1..21: mol_type = other RNA
gcacttcgccttccaggattt

SEQ ID NO: 1209 - RNA, 21 nt, synthetic construct
  modified_base 1: mod_base = cm
  modified_base 2: mod_base = OTHER; note = 2'-O-methyladenosine
  modified_base 3: mod_base = gm
  modified_base 4: mod_base = cm
  modified_base 5: mod_base = gm
  modified_base 6: mod_base = OTHER; note = 2'-O-methyladenosine
  modified_base 7: mod_base = gm
  modified_base 8: mod_base = gm
  modified_base 9: mod_base = OTHER; note = 2'-fluorouridine
  modified_base 10: mod_base = OTHER; note = 2'-fluoroadenosine
  modified_base 11: mod_base = OTHER; note = 2'-fluoroguanosine
  modified_base 12: mod_base = cm
  modified_base 13: mod_base = gm
  modified_base 14: mod_base = gm
  modified_base 15: mod_base = um
  modified_base 16: mod_base = OTHER; note = 2'-O-methyladenosine
  modified_base 17: mod_base = gm
  modified_base 18: mod_base = um
  modified_base 19: mod_base = gm
  modified_base 20: mod_base = OTHER; note = 2'-O-methyladenosine
  modified_base 21: mod_base = OTHER; note = 2'-O-methyladenosine
  source 1..21: mol_type = other RNA
cagcgaggtagcggtagtgaa

SEQ ID NO: 1210 - RNA, 21 nt, synthetic construct
  modified_base 1: mod_base = cm
  modified_base 2: mod_base = um
  modified_base 3: mod_base = gm
  modified_base 4: mod_base = cm
  modified_base 5: mod_base = OTHER; note = 2'-O-methyladenosine
  modified_base 6: mod_base = cm
  modified_base 7: mod_base = um
  modified_base 8: mod_base = um
  modified_base 9: mod_base = OTHER; note = 2'-fluorocytidine
  modified_base 10: mod_base = OTHER; note = 2'-fluoroguanosine
  modified_base 11: mod_base = OTHER; note = 2'-fluorocytidine
  modified_base 12: mod_base = cm
  modified_base 13: mod_base = um
  modified_base 14: mod_base = um
  modified_base 15: mod_base = cm
  modified_base 16: mod_base = cm
  modified_base 17: mod_base = OTHER; note = 2'-O-methyladenosine
  modified_base 18: mod_base = gm
  modified_base 19: mod_base = gm
  modified_base 20: mod_base = OTHER; note = 2'-O-methyladenosine
  modified_base 21: mod_base = um
  source 1..21: mol_type = other RNA
ctgcacttcgccttccaggat

SEQ ID NO: 1211 - RNA, 21 nt, synthetic construct
  modified_base 1: mod_base = OTHER; note = 2'-O-methyladenosine
  modified_base 2: mod_base = gm
  modified_base 3: mod_base = gm
  modified_base 4: mod_base = gm
  modified_base 5: mod_base = gm
  modified_base 6: mod_base = cm
  modified_base 7: mod_base = gm
  modified_base 8: mod_base = OTHER; note = 2'-O-methyladenosine
  modified_base 9: mod_base = OTHER; note = 2'-fluoroguanosine
  modified_base 10: mod_base = OTHER; note = 2'-fluoroguanosine
  modified_base 11: mod_base = OTHER; note = 2'-fluorouridine
  modified_base 12: mod_base = gm
  modified_base 13: mod_base = um
  modified_base 14: mod_base = cm
  modified_base 15: mod_base = gm
  modified_base 16: mod_base = um
  modified_base 17: mod_base = gm
  modified_base 18: mod_base = cm
  modified_base 19: mod_base = um
  modified_base 20: mod_base = um
  modified_base 21: mod_base = OTHER; note = 2'-O-methyladenosine
  source 1..21: mol_type = other RNA
aggggcgaggtgtcgtgctta

SEQ ID NO: 1212 - RNA, 21 nt, synthetic construct
  modified_base 1: mod_base = gm
  modified_base 2: mod_base = gm
  modified_base 3: mod_base = cm
  modified_base 4: mod_base = OTHER; note = 2'-O-methyladenosine
  modified_base 5: mod_base = gm
  modified_base 6: mod_base = OTHER; note = 2'-O-methyladenosine
  modified_base 7: mod_base = cm
  modified_base 8: mod_base = gm
  modified_base 9: mod_base = OTHER; note = 2'-fluorocytidine
  modified_base 10: mod_base = OTHER; note = 2'-fluorocytidine
  modified_base 11: mod_base = OTHER; note = 2'-fluorocytidine
  modified_base 12: mod_base = um
  modified_base 13: mod_base = um
  modified_base 14: mod_base = cm
  modified_base 15: mod_base = um
  modified_base 16: mod_base = OTHER; note = 2'-O-methyladenosine
  modified_base 17: mod_base = cm
  modified_base 18: mod_base = gm
  modified_base 19: mod_base = cm
  modified_base 20: mod_base = gm
  modified_base 21: mod_base = OTHER; note = 2'-O-methyladenosine
  source 1..21: mol_type = other RNA
ggcagacgcccttctacgcga

SEQ ID NO: 1213 - RNA, 21 nt, synthetic construct
  modified_base 1: mod_base = cm
  modified_base 2: mod_base = cm
  modified_base 3: mod_base = cm
  modified_base 4: mod_base = cm
  modified_base 5: mod_base = gm
  modified_base 6: mod_base = OTHER; note = 2'-O-methyladenosine
  modified_base 7: mod_base = cm
  modified_base 8: mod_base = OTHER; note = 2'-O-methyladenosine
  modified_base 9: mod_base = OTHER; note = 2'-fluorouridine
  modified_base 10: mod_base = OTHER; note = 2'-fluorouridine
  modified_base 11: mod_base = OTHER; note = 2'-fluorocytidine
  modified_base 12: mod_base = cm
  modified_base 13: mod_base = um
  modified_base 14: mod_base = cm
  modified_base 15: mod_base = gm
  modified_base 16: mod_base = gm
  modified_base 17: mod_base = um
  modified_base 18: mod_base = OTHER; note = 2'-O-methyladenosine
  modified_base 19: mod_base = um
  modified_base 20: mod_base = um
  modified_base 21: mod_base = OTHER; note = 2'-O-methyladenosine
  source 1..21: mol_type = other RNA
ccccgacattcctcggtatta

SEQ ID NO: 1214 - RNA, 21 nt, synthetic construct
  modified_base 1: mod_base = um
  modified_base 2: mod_base = um
  modified_base 3: mod_base = cm
  modified_base 4: mod_base = cm
  modified_base 5: mod_base = um
  modified_base 6: mod_base = cm
  modified_base 7: mod_base = gm
  modified_base 8: mod_base = gm
  modified_base 9: mod_base = OTHER; note = 2'-fluorouridine
  modified_base 10: mod_base = OTHER; note = 2'-fluoroadenosine
  modified_base 11: mod_base = OTHER; note = 2'-fluorouridine
  modified_base 12: mod_base = um
  modified_base 13: mod_base = um
  modified_base 14: mod_base = OTHER; note = 2'-O-methyladenosine
  modified_base 15: mod_base = um
  modified_base 16: mod_base = um
  modified_base 17: mod_base = gm
  modified_base 18: mod_base = um
  modified_base 19: mod_base = cm
  modified_base 20: mod_base = um
  modified_base 21: mod_base = OTHER; note = 2'-O-methyladenosine
  source 1..21: mol_type = other RNA
ttcctcggtatttattgtcta

SEQ ID NO: 1215 - RNA, 21 nt, synthetic construct
  modified_base 1: mod_base = OTHER; note = 2'-O-methyladenosine
  modified_base 2: mod_base = cm
  modified_base 3: mod_base = um
  modified_base 4: mod_base = cm
  modified_base 5: mod_base = gm
  modified_base 6: mod_base = gm
  modified_base 7: mod_base = gm
  modified_base 8: mod_base = OTHER; note = 2'-O-methyladenosine
  modified_base 9: mod_base = OTHER; note = 2'-fluoroadenosine
  modified_base 10: mod_base = OTHER; note = 2'-fluoroadenosine
  modified_base 11: mod_base = OTHER; note = 2'-fluorouridine
  modified_base 12: mod_base = um
  modified_base 13: mod_base = um
  modified_base 14: mod_base = gm
  modified_base 15: mod_base = cm
  modified_base 16: mod_base = um
  modified_base 17: mod_base = um
  modified_base 18: mod_base = um
  modified_base 19: mod_base = um
  modified_base 20: mod_base = gm
  modified_base 21: mod_base = OTHER; note = 2'-O-methyladenosine
  source 1..21: mol_type = other RNA
actcgggaaatttgcttttga

SEQ ID NO: 1216 - RNA, 21 nt, synthetic construct
  modified_base 1: mod_base = gm
  modified_base 2: mod_base = gm
  modified_base 3: mod_base = OTHER; note = 2'-O-methyladenosine
  modified_base 4: mod_base = OTHER; note = 2'-O-methyladenosine
  modified_base 5: mod_base = OTHER; note = 2'-O-methyladenosine
  modified_base 6: mod_base = um
  modified_base 7: mod_base = um
  modified_base 8: mod_base = um
  modified_base 9: mod_base = OTHER; note = 2'-fluoroguanosine
  modified_base 10: mod_base = OTHER; note = 2'-fluorocytidine
  modified_base 11: mod_base = OTHER; note = 2'-fluorouridine
  modified_base 12: mod_base = um
  modified_base 13: mod_base = um
  modified_base 14: mod_base = um
  modified_base 15: mod_base = gm
  modified_base 16: mod_base = um
  modified_base 17: mod_base = cm
  modified_base 18: mod_base = OTHER; note = 2'-O-methyladenosine
  modified_base 19: mod_base = OTHER; note = 2'-O-methyladenosine
  modified_base 20: mod_base = OTHER; note = 2'-O-methyladenosine
  modified_base 21: mod_base = OTHER; note = 2'-O-methyladenosine
  source 1..21: mol_type = other RNA
ggaaatttgcttttgtcaaaa

SEQ ID NO: 1217 - RNA, 21 nt, synthetic construct
  modified_base 1: mod_base = um
  modified_base 2: mod_base = cm
  modified_base 3: mod_base = gm
  modified_base 4: mod_base = gm
  modified_base 5: mod_base = cm
  modified_base 6: mod_base = gm
  modified_base 7: mod_base = gm
  modified_base 8: mod_base = um
  modified_base 9: mod_base = OTHER; note = 2'-fluorouridine
  modified_base 10: mod_base = OTHER; note = 2'-fluorouridine
  modified_base 11: mod_base = OTHER; note = 2'-fluoroguanosine
  modified_base 12: mod_base = gm
  modified_base 13: mod_base = OTHER; note = 2'-O-methyladenosine
  modified_base 14: mod_base = um
  modified_base 15: mod_base = OTHER; note = 2'-O-methyladenosine
  modified_base 16: mod_base = um
  modified_base 17: mod_base = um
  modified_base 18: mod_base = um
  modified_base 19: mod_base = OTHER; note = 2'-O-methyl-2-aminoadenosine
  modified_base 20: mod_base = um
  modified_base 21: mod_base = um
  source 1..21: mol_type = other RNA
tcggcggtttggatatttntt

SEQ ID NO: 1218 - RNA, 21 nt, synthetic construct
  modified_base 1: mod_base = cm
  modified_base 2: mod_base = gm
  modified_base 3: mod_base = gm
  modified_base 4: mod_base = cm
  modified_base 5: mod_base = gm
  modified_base 6: mod_base = gm
  modified_base 7: mod_base = um
  modified_base 8: mod_base = um
  modified_base 9: mod_base = OTHER; note = 2'-fluorouridine
  modified_base 10: mod_base = OTHER; note = 2'-fluoroguanosine
  modified_base 11: mod_base = OTHER; note = 2'-fluoroguanosine
  modified_base 12: mod_base = OTHER; note = 2'-O-methyladenosine
  modified_base 13: mod_base = um
  modified_base 14: mod_base = OTHER; note = 2'-O-methyladenosine
  modified_base 15: mod_base = um
  modified_base 16: mod_base = um
  modified_base 17: mod_base = um
  modified_base 18: mod_base = OTHER; note = 2'-O-methyl-2-aminoadenosine
  modified_base 19: mod_base = um
  modified_base 20: mod_base = um
  modified_base 21: mod_base = OTHER; note = 2'-O-methyladenosine
  source 1..21: mol_type = other RNA
cggcggtttggatatttntta

SEQ ID NO: 1219 - RNA, 21 nt, synthetic construct
  modified_base 1: mod_base = OTHER; note = 2'-O-methyladenosine
  modified_base 2: mod_base = OTHER; note = 2'-O-methyladenosine
  modified_base 3: mod_base = cm
  modified_base 4: mod_base = cm
  modified_base 5: mod_base = cm
  modified_base 6: mod_base = cm
  modified_base 7: mod_base = OTHER; note = 2'-O-methyladenosine
  modified_base 8: mod_base = OTHER; note = 2'-O-methyladenosine
  modified_base 9: mod_base = OTHER; note = 2'-fluorouridine
  modified_base 10: mod_base = OTHER; note = 2'-fluorocytidine
  modified_base 11: mod_base = OTHER; note = 2'-fluorocytidine
  modified_base 12: mod_base = OTHER; note = 2'-O-methyladenosine
  modified_base 13: mod_base = cm
  modified_base 14: mod_base = gm
  modified_base 15: mod_base = um
  modified_base 16: mod_base = um
  modified_base 17: mod_base = um
  modified_base 18: mod_base = um
  modified_base 19: mod_base = gm
  modified_base 20: mod_base = gm
  modified_base 21: mod_base = OTHER; note = 2'-O-methyladenosine
  source 1..21: mol_type = other RNA
aaccccaatccacgttttgga

SEQ ID NO: 1220 - RNA, 21 nt, synthetic construct
  modified_base 1: mod_base = gm
  modified_base 2: mod_base = OTHER; note = 2'-O-methyladenosine
  modified_base 3: mod_base = um
  modified_base 4: mod_base = cm
  modified_base 5: mod_base = cm
  modified_base 6: mod_base = OTHER; note = 2'-O-methyladenosine
  modified_base 7: mod_base = cm
  modified_base 8: mod_base = gm
  modified_base 9: mod_base = OTHER; note = 2'-fluorouridine
  modified_base 10: mod_base = OTHER; note = 2'-fluorouridine
  modified_base 11: mod_base = OTHER; note = 2'-fluorouridine
  modified_base 12: mod_base = um
  modified_base 13: mod_base = gm
  modified_base 14: mod_base = gm
  modified_base 15: mod_base = OTHER; note = 2'-O-methyladenosine
  modified_base 16: mod_base = um
  modified_base 17: mod_base = OTHER; note = 2'-O-methylinosine
  modified_base 18: mod_base = cm
  modified_base 19: mod_base = OTHER; note = 2'-O-methyladenosine
  modified_base 20: mod_base = cm
  modified_base 21: mod_base = um
  source 1..21: mol_type = other RNA
gatccacgttttggatncact

SEQ ID NO: 1221 - RNA, 21 nt, synthetic construct
  modified_base 1: mod_base = OTHER; note = 2'-O-methyladenosine
  modified_base 2: mod_base = cm
  modified_base 3: mod_base = gm
  modified_base 4: mod_base = um
  modified_base 5: mod_base = um
  modified_base 6: mod_base = um
  modified_base 7: mod_base = um
  modified_base 8: mod_base = gm
  modified_base 9: mod_base = OTHER; note = 2'-fluoroguanosine
  modified_base 10: mod_base = OTHER; note = 2'-fluoroadenosine
  modified_base 11: mod_base = OTHER; note = 2'-fluorouridine
  modified_base 12: mod_base = gm
  modified_base 13: mod_base = cm
  modified_base 14: mod_base = OTHER; note = 2'-O-methyladenosine
  modified_base 15: mod_base = cm
  modified_base 16: mod_base = um
  modified_base 17: mod_base = OTHER; note = 2'-O-methylinosine
  modified_base 18: mod_base = OTHER; note = 2'-O-methyladenosine
  modified_base 19: mod_base = gm
  modified_base 20: mod_base = OTHER; note = 2'-O-methyladenosine
  modified_base 21: mod_base = OTHER; note = 2'-O-methyladenosine
  source 1..21: mol_type = other RNA
acgttttggatgcactnagaa

SEQ ID NO: 1222 - RNA, 21 nt, synthetic construct
  modified_base 1: mod_base = cm
  modified_base 2: mod_base = gm
  modified_base 3: mod_base = um
  modified_base 4: mod_base = um
  modified_base 5: mod_base = um
  modified_base 6: mod_base = um
  modified_base 7: mod_base = gm
  modified_base 8: mod_base = gm
  modified_base 9: mod_base = OTHER; note = 2'-fluoroadenosine
  modified_base 10: mod_base = OTHER; note = 2'-fluorouridine
  modified_base 11: mod_base = OTHER; note = 2'-fluoroguanosine
  modified_base 12: mod_base = cm
  modified_base 13: mod_base = OTHER; note = 2'-O-methyladenosine
  modified_base 14: mod_base = cm
  modified_base 15: mod_base = um
  modified_base 16: mod_base = OTHER; note = 2'-O-methylinosine
  modified_base 17: mod_base = OTHER; note = 2'-O-methyladenosine
  modified_base 18: mod_base = gm
  modified_base 19: mod_base = OTHER; note = 2'-O-methyladenosine
  modified_base 20: mod_base = cm
  modified_base 21: mod_base = OTHER; note = 2'-O-methyladenosine
  source 1..21: mol_type = other RNA
cgttttggatgcactnagaca

SEQ ID NO: 1223 - RNA, 21 nt, synthetic construct
  modified_base 1: mod_base = OTHER; note = 2'-O-methyladenosine
  modified_base 2: mod_base = um
  modified_base 3: mod_base = um
  modified_base 4: mod_base = cm
  modified_base 5: mod_base = cm
  modified_base 6: mod_base = um
  modified_base 7: mod_base = cm
  modified_base 8: mod_base = gm
  modified_base 9: mod_base = OTHER; note = 2'-fluoroguanosine
  modified_base 10: mod_base = OTHER; note = 2'-fluorouridine
  modified_base 11: mod_base = OTHER; note = 2'-fluoroadenosine
  modified_base 12: mod_base = um
  modified_base 13: mod_base = um
  modified_base 14: mod_base = um
  modified_base 15: mod_base = OTHER; note = 2'-O-methyladenosine
  modified_base 16: mod_base = um
  modified_base 17: mod_base = um
  modified_base 18: mod_base = gm
  modified_base 19: mod_base = um
  modified_base 20: mod_base = cm
  modified_base 21: mod_base = um
  source 1..21: mol_type = other RNA
attcctcggtatttattgtct

SEQ ID NO: 1224 - RNA, 21 nt, synthetic construct
  modified_base 1: mod_base = cm
  modified_base 2: mod_base = cm
  modified_base 3: mod_base = um
  modified_base 4: mod_base = cm
  modified_base 5: mod_base = gm
  modified_base 6: mod_base = gm
  modified_base 7: mod_base = um
  modified_base 8: mod_base = OTHER; note = 2'-O-methyladenosine
  modified_base 9: mod_base = OTHER; note = 2'-fluorouridine
  modified_base 10: mod_base = OTHER; note = 2'-fluorouridine
  modified_base 11: mod_base = OTHER; note = 2'-fluorouridine
  modified_base 12: mod_base = OTHER; note = 2'-O-methyladenosine
  modified_base 13: mod_base = um
  modified_base 14: mod_base = um
  modified_base 15: mod_base = gm
  modified_base 16: mod_base = um
  modified_base 17: mod_base = um
  modified_base 18: mod_base = um
  modified_base 19: mod_base = gm
  modified_base 20: mod_base = um
  modified_base 21: mod_base = OTHER; note = 2'-O-methyladenosine
  source 1..21: mol_type = other RNA
cctcggtatttattgtttgta

SEQ ID NO: 1225 - RNA, 21 nt, synthetic construct
  modified_base 1: mod_base = cm
  modified_base 2: mod_base = um
  modified_base 3: mod_base = cm
  modified_base 4: mod_base = gm
  modified_base 5: mod_base = gm
  modified_base 6: mod_base = um
  modified_base 7: mod_base = OTHER; note = 2'-O-methyladenosine
  modified_base 8: mod_base = um
  modified_base 9: mod_base = OTHER; note = 2'-fluorouridine
  modified_base 10: mod_base = OTHER; note = 2'-fluorouridine
  modified_base 11: mod_base = OTHER; note = 2'-fluoroadenosine
  modified_base 12: mod_base = um
  modified_base 13: mod_base = um
  modified_base 14: mod_base = gm
  modified_base 15: mod_base = um
  modified_base 16: mod_base = cm
  modified_base 17: mod_base = um
  modified_base 18: mod_base = OTHER; note = 2'-O-methylinosine
  modified_base 19: mod_base = um
  modified_base 20: mod_base = cm
  modified_base 21: mod_base = OTHER; note = 2'-O-methyladenosine
  source 1..21: mol_type = other RNA
ctcggtatttattgtctntca

SEQ ID NO: 1226 - RNA, 21 nt, synthetic construct
  modified_base 1: mod_base = gm
  modified_base 2: mod_base = OTHER; note = 2'-O-methyladenosine
  modified_base 3: mod_base = um
  modified_base 4: mod_base = um
  modified_base 5: mod_base = gm
  modified_base 6: mod_base = um
  modified_base 7: mod_base = cm
  modified_base 8: mod_base = um
  modified_base 9: mod_base = OTHER; note = 2'-fluoroguanosine
  modified_base 10: mod_base = OTHER; note = 2'-fluorouridine
  modified_base 11: mod_base = OTHER; note = 2'-fluorocytidine
  modified_base 12: mod_base = cm
  modified_base 13: mod_base = cm
  modified_base 14: mod_base = cm
  modified_base 15: mod_base = OTHER; note = 2'-O-methyladenosine
  modified_base 16: mod_base = um
  modified_base 17: mod_base = cm
  modified_base 18: mod_base = um
  modified_base 19: mod_base = OTHER; note = 2'-O-methyladenosine
  modified_base 20: mod_base = gm
  modified_base 21: mod_base = OTHER; note = 2'-O-methyladenosine
  source 1..21: mol_type = other RNA
gattgtctgtccccatctaga

SEQ ID NO: 1227 - RNA, 21 nt, synthetic construct
  modified_base 1: mod_base = gm
  modified_base 2: mod_base = cm
  modified_base 3: mod_base = OTHER; note = 2'-O-methyladenosine
  modified_base 4: mod_base = um
  modified_base 5: mod_base = um
  modified_base 6: mod_base = cm
  modified_base 7: mod_base = cm
  modified_base 8: mod_base = um
  modified_base 9: mod_base = OTHER; note = 2'-fluorocytidine
  modified_base 10: mod_base = OTHER; note = 2'-fluoroguanosine
  modified_base 11: mod_base = OTHER; note = 2'-fluoroguanosine
  modified_base 12: mod_base = um
  modified_base 13: mod_base = OTHER; note = 2'-O-methyladenosine
  modified_base 14: mod_base = um
  modified_base 15: mod_base = um
  modified_base 16: mod_base = um
  modified_base 17: mod_base = OTHER; note = 2'-O-methyladenosine
  modified_base 18: mod_base = um
  modified_base 19: mod_base = um
  modified_base 20: mod_base = gm
  modified_base 21: mod_base = um
  source 1..21: mol_type = other RNA
gcattcctcggtatttattgt

SEQ ID NO: 1228 - RNA, 21 nt, synthetic construct
  modified_base 1: mod_base = cm
  modified_base 2: mod_base = cm
  modified_base 3: mod_base = um
  modified_base 4: mod_base = gm
  modified_base 5: mod_base = gm
  modified_base 6: mod_base = um
  modified_base 7: mod_base = cm
  modified_base 8: mod_base = OTHER; note = 2'-O-methyladenosine
  modified_base 9: mod_base = OTHER; note = 2'-fluorouridine
  modified_base 10: mod_base = OTHER; note = 2'-fluoroguanosine
  modified_base 11: mod_base = OTHER; note = 2'-fluoroguanosine
  modified_base 12: mod_base = OTHER; note = 2'-O-methyladenosine
  modified_base 13: mod_base = gm
  modified_base 14: mod_base = um
  modified_base 15: mod_base = OTHER; note = 2'-O-methyladenosine
  modified_base 16: mod_base = um
  modified_base 17: mod_base = um
  modified_base 18: mod_base = OTHER; note = 2'-O-methyladenosine
  modified_base 19: mod_base = cm
  modified_base 20: mod_base = gm
  modified_base 21: mod_base = um
  source 1..21: mol_type = other RNA
cctggtcatggagtattacgt

SEQ ID NO: 1229 - RNA, 21 nt, synthetic construct
  modified_base 1: mod_base = gm
  modified_base 2: mod_base = um
  modified_base 3: mod_base = cm
  modified_base 4: mod_base = cm
  modified_base 5: mod_base = um
  modified_base 6: mod_base = cm
  modified_base 7: mod_base = gm
  modified_base 8: mod_base = gm
  modified_base 9: mod_base = OTHER; note = 2'-fluorouridine
  modified_base 10: mod_base = OTHER; note = 2'-fluoroadenosine
  modified_base 11: mod_base = OTHER; note = 2'-fluorouridine
  modified_base 12: mod_base = um
  modified_base 13: mod_base = um
  modified_base 14: mod_base = OTHER; note = 2'-O-methyladenosine
  modified_base 15: mod_base = um
  modified_base 16: mod_base = um
  modified_base 17: mod_base = gm
  modified_base 18: mod_base = um
  modified_base 19: mod_base = cm
  modified_base 20: mod_base = um
  modified_base 21: mod_base = OTHER; note = 2'-O-methyladenosine
  source 1..21: mol_type = other RNA
gtcctcggtatttattgtcta

SEQ ID NO: 1230 - RNA, 21 nt, synthetic construct
  modified_base 1: mod_base = um
  modified_base 2: mod_base = um
  modified_base 3: mod_base = cm
  modified_base 4: mod_base = cm
  modified_base 5: mod_base = um
  modified_base 6: mod_base = cm
  modified_base 7: mod_base = gm
  modified_base 8: mod_base = gm
  modified_base 9: mod_base = OTHER; note = 2'-fluorouridine
  modified_base 10: mod_base = OTHER; note = 2'-O-methyladenosine
  modified_base 11: mod_base = OTHER; note = 2'-fluorouridine
  modified_base 12: mod_base = um
  modified_base 13: mod_base = OTHER; note = 2'-fluorouridine
  modified_base 14: mod_base = OTHER; note = 2'-O-methyladenosine
  modified_base 15: mod_base = um
  modified_base 16: mod_base = um
  modified_base 17: mod_base = gm
  modified_base 18: mod_base = um
  modified_base 19: mod_base = cm
  modified_base 20: mod_base = um
  modified_base 21: mod_base = OTHER; note = 2'-O-methyladenosine
  source 1..21: mol_type = other RNA
ttcctcggtatttattgtcta

SEQ ID NO: 1231 - RNA, 21 nt, synthetic construct
  modified_base 1: mod_base = cm
  modified_base 2: mod_base = cm
  modified_base 3: mod_base = um
  modified_base 4: mod_base = gm
  modified_base 5: mod_base = gm
  modified_base 6: mod_base = um
  modified_base 7: mod_base = cm
  modified_base 8: mod_base = OTHER; note = 2'-O-methyladenosine
  modified_base 9: mod_base = OTHER; note = 2'-fluorouridine
  modified_base 10: mod_base = gm
  modified_base 11: mod_base = OTHER; note = 2'-fluoroguanosine
  modified_base 12: mod_base = OTHER; note = 2'-O-methyladenosine
  modified_base 13: mod_base = OTHER; note = 2'-fluoroguanosine
  modified_base 14: mod_base = um
  modified_base 15: mod_base = OTHER; note = 2'-O-methyladenosine
  modified_base 16: mod_base = um
  modified_base 17: mod_base = um
  modified_base 18: mod_base = OTHER; note = 2'-O-methyladenosine
  modified_base 19: mod_base = cm
  modified_base 20: mod_base = gm
  modified_base 21: mod_base = um
  source 1..21: mol_type = other RNA
cctggtcatggagtattacgt

SEQ ID NO: 1232 - RNA, 21 nt, synthetic construct
  modified_base 1: mod_base = cm
  modified_base 2: mod_base = cm
  modified_base 3: mod_base = um
  modified_base 4: mod_base = gm
  modified_base 5: mod_base = gm
  modified_base 6: mod_base = um
  modified_base 7: mod_base = cm
  modified_base 8: mod_base = OTHER; note = 2'-O-methyladenosine
  modified_base 9: mod_base = OTHER; note = 2'-fluorouridine
  modified_base 10: mod_base = gm
  modified_base 11: mod_base = OTHER; note = 2'-fluoroguanosine
  modified_base 12: mod_base = OTHER; note = 2'-O-methyladenosine
  modified_base 13: mod_base = gm
  modified_base 14: mod_base = um
  modified_base 15: mod_base = OTHER; note = 2'-O-methyladenosine
  modified_base 16: mod_base = um
  modified_base 17: mod_base = um
  modified_base 18: mod_base = OTHER; note = 2'-O-methyladenosine
  modified_base 19: mod_base = cm
  modified_base 20: mod_base = gm
  modified_base 21: mod_base = um
  source 1..21: mol_type = other RNA
cctggtcatggagtattacgt

SEQ ID NO: 1233 - RNA, 21 nt, synthetic construct
  modified_base 1: mod_base = cm
  modified_base 2: mod_base = cm
  modified_base 3: mod_base = cm
  modified_base 4: mod_base = cm
  modified_base 5: mod_base = gm
  modified_base 6: mod_base = OTHER; note = 2'-O-methyladenosine
  modified_base 7: mod_base = cm
  modified_base 8: mod_base = OTHER; note = 2'-O-methyladenosine
  modified_base 9: mod_base = OTHER; note = 2'-fluorouridine
  modified_base 10: mod_base = OTHER; note = 2'-fluorouridine
  modified_base 11: mod_base = OTHER; note = 2'-fluorocytidine
  modified_base 12: mod_base = cm
  modified_base 13: mod_base = um
  modified_base 14: mod_base = cm
  modified_base 15: mod_base = gm
  modified_base 16: mod_base = gm
  modified_base 17: mod_base = um
  modified_base 18: mod_base = OTHER; note = 2'-O-methyladenosine
  modified_base 19: mod_base = um
  modified_base 20: mod_base = um
  modified_base 21: mod_base = OTHER; note = 2'-O-methyladenosine
  source 1..21: mol_type = other RNA
ccccgacattcctcggtatta

SEQ ID NO: 1234 - RNA, 21 nt, synthetic construct
  modified_base 1: mod_base = um
  modified_base 2: mod_base = um
  modified_base 3: mod_base = cm
  modified_base 4: mod_base = cm
  modified_base 5: mod_base = um
  modified_base 6: mod_base = cm
  modified_base 7: mod_base = gm
  modified_base 8: mod_base = gm
  modified_base 9: mod_base = OTHER; note = 2'-fluorouridine
  modified_base 10: mod_base = OTHER; note = 2'-fluoroadenosine
  modified_base 11: mod_base = OTHER; note = 2'-fluorouridine
  modified_base 12: mod_base = um
  modified_base 13: mod_base = um
  modified_base 14: mod_base = OTHER; note = 2'-O-methyladenosine
  modified_base 15: mod_base = um
  modified_base 16: mod_base = um
  modified_base 17: mod_base = gm
  modified_base 18: mod_base = um
  modified_base 19: mod_base = cm
  modified_base 20: mod_base = um
  modified_base 21: mod_base = OTHER; note = 2'-O-methyladenosine
  source 1..21: mol_type = other RNA
ttcctcggtatttattgtcta

SEQ ID NO: 1235 - RNA, 21 nt, synthetic construct
  modified_base 1: mod_base = um
  modified_base 2: mod_base = gm
  modified_base 3: mod_base = gm
  modified_base 4: mod_base = cm
  modified_base 5: mod_base = OTHER; note = 2'-O-methyladenosine
  modified_base 6: mod_base = OTHER; note = 2'-O-methyladenosine
  modified_base 7: mod_base = gm
  modified_base 8: mod_base = OTHER; note = 2'-O-methyladenosine
  modified_base 9: mod_base = OTHER; note = 2'-fluorouridine
  modified_base 10: mod_base = cm
  modified_base 11: mod_base = OTHER; note = 2'-fluoroguanosine
  modified_base 12: mod_base = um
  modified_base 13: mod_base = cm
  modified_base 14: mod_base = cm
  modified_base 15: mod_base = OTHER; note = 2'-O-methyladenosine
  modified_base 16: mod_base = cm
  modified_base 17: mod_base = um
  modified_base 18: mod_base = OTHER; note = 2'-O-methyladenosine
  modified_base 19: mod_base = cm
  modified_base 20: mod_base = OTHER; note = 2'-O-methyladenosine
  modified_base 21: mod_base = OTHER; note = 2'-O-methyladenosine
  source 1..21: mol_type = other RNA
tggcaagatcgtccactacaa

SEQ ID NO: 1236 - RNA, 21 nt, synthetic construct
  modified_base 1: mod_base = um
  modified_base 2: mod_base = gm
  modified_base 3: mod_base = gm
  modified_base 4: mod_base = cm
  modified_base 5: mod_base = OTHER; note = 2'-O-methyladenosine
  modified_base 6: mod_base = OTHER; note = 2'-O-methyladenosine
  modified_base 7: mod_base = OTHER; note = 2'-fluoroguanosine
  modified_base 8: mod_base = OTHER; note = 2'-O-methyladenosine
  modified_base 9: mod_base = OTHER; note = 2'-fluorouridine
  modified_base 10: mod_base = cm
  modified_base 11: mod_base = OTHER; note = 2'-fluoroguanosine
  modified_base 12: mod_base = um
  modified_base 13: mod_base = cm
  modified_base 14: mod_base = cm
  modified_base 15: mod_base = OTHER; note = 2'-O-methyladenosine
  modified_base 16: mod_base = cm
  modified_base 17: mod_base = um
  modified_base 18: mod_base = OTHER; note = 2'-O-methyladenosine
  modified_base 19: mod_base = cm
  modified_base 20: mod_base = OTHER; note = 2'-O-methyladenosine
  modified_base 21: mod_base = OTHER; note = 2'-O-methyladenosine
  source 1..21: mol_type = other RNA
tggcaagatcgtccactacaa

SEQ ID NO: 1237 - RNA, 21 nt, synthetic construct
  modified_base 1: mod_base = gm
  modified_base 2: mod_base = um
  modified_base 3: mod_base = cm
  modified_base 4: mod_base = cm
  modified_base 5: mod_base = um
  modified_base 6: mod_base = cm
  modified_base 7: mod_base = gm
  modified_base 8: mod_base = gm
  modified_base 9: mod_base = OTHER; note = 2'-fluorouridine
  modified_base 10: mod_base = OTHER; note = 2'-O-methyladenosine
  modified_base 11: mod_base = OTHER; note = 2'-fluorouridine
  modified_base 12: mod_base = um
  modified_base 13: mod_base = OTHER; note = 2'-fluorouridine
  modified_base 14: mod_base = OTHER; note = 2'-O-methyladenosine
  modified_base 15: mod_base = um
  modified_base 16: mod_base = um
  modified_base 17: mod_base = gm
  modified_base 18: mod_base = um
  modified_base 19: mod_base = cm
  modified_base 20: mod_base = um
  modified_base 21: mod_base = OTHER; note = 2'-O-methyladenosine
  source 1..21: mol_type = other RNA
gtcctcggtatttattgtcta

SEQ ID NO: 1238 - RNA, 21 nt, synthetic construct
  modified_base 1: mod_base = um
  modified_base 2: mod_base = um
  modified_base 3: mod_base = cm
  modified_base 4: mod_base = cm
  modified_base 5: mod_base = um
  modified_base 6: mod_base = cm
  modified_base 7: mod_base = gm
  modified_base 8: mod_base = gm
  modified_base 9: mod_base = OTHER; note = 2'-fluorouridine
  modified_base 10: mod_base = OTHER; note = 2'-O-methyladenosine
  modified_base 11: mod_base = OTHER; note = 2'-fluorouridine
  modified_base 12: mod_base = OTHER; note = 2'-fluorouridine
  modified_base 13: mod_base = um
  modified_base 14: mod_base = OTHER; note = 2'-O-methyladenosine
  modified_base 15: mod_base = um
  modified_base 16: mod_base = um
  modified_base 17: mod_base = gm
  modified_base 18: mod_base = um
  modified_base 19: mod_base = cm
  modified_base 20: mod_base = um
  modified_base 21: mod_base = OTHER; note = 2'-O-methyladenosine
  source 1..21: mol_type = other RNA
ttcctcggtatttattgtcta

SEQ ID NO: 1239 - RNA, 21 nt, synthetic construct
  modified_base 1: mod_base = OTHER; note = 2'-O-methyladenosine
  modified_base 2: mod_base = cm
  modified_base 3: mod_base = OTHER; note = 2'-O-methyladenosine
  modified_base 4: mod_base = OTHER; note = 2'-O-methyladenosine
  modified_base 5: mod_base = gm
  modified_base 6: mod_base = um
  modified_base 7: mod_base = gm
  modified_base 8: mod_base = gm
  modified_base 9: mod_base = OTHER; note = 2'-fluoroguanosine
  modified_base 10: mod_base = OTHER; note = 2'-fluoroadenosine
  modified_base 11: mod_base = OTHER; note = 2'-fluorocytidine
  modified_base 12: mod_base = OTHER; note = 2'-O-methyladenosine
  modified_base 13: mod_base = um
  modified_base 14: mod_base = gm
  modified_base 15: mod_base = cm
  modified_base 16: mod_base = um
  modified_base 17: mod_base = OTHER; note = 2'-O-methylinosine
  modified_base 18: mod_base = OTHER; note = 2'-O-methyladenosine
  modified_base 19: mod_base = OTHER; note = 2'-O-methyladenosine
  modified_base 20: mod_base = gm
  modified_base 21: mod_base = OTHER; note = 2'-O-methyladenosine
  source 1..21: mol_type = other RNA
acaagtgggacatgctnaaga

SEQ ID NO: 1240 - RNA, 21 nt, synthetic construct
  modified_base 1: mod_base = cm
  modified_base 2: mod_base = OTHER; note = 2'-O-methyladenosine
  modified_base 3: mod_base = OTHER; note = 2'-O-methyladenosine
  modified_base 4: mod_base = gm
  modified_base 5: mod_base = um
  modified_base 6: mod_base = gm
  modified_base 7: mod_base = gm
  modified_base 8: mod_base = gm
  modified_base 9: mod_base = OTHER; note = 2'-fluoroadenosine
  modified_base 10: mod_base = OTHER; note = 2'-fluorocytidine
  modified_base 11: mod_base = OTHER; note = 2'-fluoroadenosine
  modified_base 12: mod_base = um
  modified_base 13: mod_base = gm
  modified_base 14: mod_base = cm
  modified_base 15: mod_base = um
  modified_base 16: mod_base = OTHER; note = 2'-O-methylinosine
  modified_base 17: mod_base = OTHER; note = 2'-O-methyladenosine
  modified_base 18: mod_base = OTHER; note = 2'-O-methyladenosine
  modified_base 19: mod_base = gm
  modified_base 20: mod_base = OTHER; note = 2'-O-methyladenosine
  modified_base 21: mod_base = OTHER; note = 2'-O-methyladenosine
  source 1..21: mol_type = other RNA
caagtgggacatgctnaagaa

SEQ ID NO: 1241 - RNA, 21 nt, synthetic construct
  modified_base 1: mod_base = cm
  modified_base 2: mod_base = um
  modified_base 3: mod_base = um
  modified_base 4: mod_base = cm
  modified_base 5: mod_base = cm
  modified_base 6: mod_base = OTHER; note = 2'-O-methyladenosine
  modified_base 7: mod_base = gm
  modified_base 8: mod_base = gm
  modified_base 9: mod_base = OTHER; note = 2'-fluoroadenosine
  modified_base 10: mod_base = OTHER; note = 2'-fluorouridine
  modified_base 11: mod_base = OTHER; note = 2'-fluoroguanosine
  modified_base 12: mod_base = OTHER; note = 2'-O-methyladenosine
  modified_base 13: mod_base = gm
  modified_base 14: mod_base = OTHER; note = 2'-O-methyladenosine
  modified_base 15: mod_base = OTHER; note = 2'-O-methyladenosine
  modified_base 16: mod_base = cm
  modified_base 17: mod_base = um
  modified_base 18: mod_base = OTHER; note = 2'-O-methyladenosine
  modified_base 19: mod_base = cm
  modified_base 20: mod_base = um
  modified_base 21: mod_base = um
  source 1..21: mol_type = other RNA
cttccaggatgagaactactt

SEQ ID NO: 1242 - RNA, 21 nt, synthetic construct
  modified_base 1: mod_base = cm
  modified_base 2: mod_base = um
  modified_base 3: mod_base = um
  modified_base 4: mod_base = cm
  modified_base 5: mod_base = cm
  modified_base 6: mod_base = OTHER; note = 2'-O-methyladenosine
  modified_base 7: mod_base = gm
  modified_base 8: mod_base = gm
  modified_base 9: mod_base = OTHER; note = 2'-fluoroadenosine
  modified_base 10: mod_base = OTHER; note = 2'-fluorouridine
  modified_base 11: mod_base = OTHER; note = 2'-fluoroguanosine
  modified_base 12: mod_base = OTHER; note = 2'-O-methyladenosine
  modified_base 13: mod_base = gm
  modified_base 14: mod_base = OTHER; note = 2'-O-methyladenosine
  modified_base 15: mod_base = OTHER; note = 2'-O-methyladenosine
  modified_base 16: mod_base = cm
  modified_base 17: mod_base = um
  modified_base 18: mod_base = OTHER; note = 2'-O-methyladenosine
  modified_base 19: mod_base = um
  modified_base 20: mod_base = cm
  modified_base 21: mod_base = um
  source 1..21: mol_type = other RNA
cttccaggatgagaactatct

SEQ ID NO: 1243 - RNA, 21 nt, synthetic construct
  modified_base 1: mod_base = um
  modified_base 2: mod_base = cm
  modified_base 3: mod_base = cm
  modified_base 4: mod_base = OTHER; note = 2'-O-methyladenosine
  modified_base 5: mod_base = gm
  modified_base 6: mod_base = gm
  modified_base 7: mod_base = OTHER; note = 2'-O-methyladenosine
  modified_base 8: mod_base = um
  modified_base 9: mod_base = OTHER; note = 2'-fluoroguanosine
  modified_base 10: mod_base = OTHER; note = 2'-fluoroadenosine
  modified_base 11: mod_base = OTHER; note = 2'-fluoroguanosine
  modified_base 12: mod_base = OTHER; note = 2'-O-methyladenosine
  modified_base 13: mod_base = OTHER; note = 2'-O-methyladenosine
  modified_base 14: mod_base = cm
  modified_base 15: mod_base = um
  modified_base 16: mod_base = OTHER; note = 2'-O-methyladenosine
  modified_base 17: mod_base = cm
  modified_base 18: mod_base = cm
  modified_base 19: mod_base = um
  modified_base 20: mod_base = OTHER; note = 2'-O-methylinosine
  modified_base 21: mod_base = um
  source 1..21: mol_type = other RNA
tccaggatgagaactacctnt

SEQ ID NO: 1244 - RNA, 21 nt, synthetic construct
  modified_base 1: mod_base = um
  modified_base 2: mod_base = cm
  modified_base 3: mod_base = cm
  modified_base 4: mod_base = OTHER; note = 2'-O-methyladenosine
  modified_base 5: mod_base = gm
  modified_base 6: mod_base = gm
  modified_base 7: mod_base = OTHER; note = 2'-O-methyladenosine
  modified_base 8: mod_base = um
  modified_base 9: mod_base = OTHER; note = 2'-fluoroguanosine
  modified_base 10: mod_base = OTHER; note = 2'-fluoroadenosine
  modified_base 11: mod_base = OTHER; note = 2'-fluoroguanosine
  modified_base 12: mod_base = OTHER; note = 2'-O-methyladenosine
  modified_base 13: mod_base = OTHER; note = 2'-O-methyladenosine
  modified_base 14: mod_base = cm
  modified_base 15: mod_base = um
  modified_base 16: mod_base = OTHER; note = 2'-O-methyladenosine
  modified_base 17: mod_base = cm
  modified_base 18: mod_base = um
  modified_base 19: mod_base = um
  modified_base 20: mod_base = gm
  modified_base 21: mod_base = um
  source 1..21: mol_type = other RNA
tccaggatgagaactacttgt

SEQ ID NO: 1245 - RNA, 21 nt, synthetic construct
  modified_base 1: mod_base = OTHER; note = 2'-O-methyladenosine
  modified_base 2: mod_base = gm
  modified_base 3: mod_base = gm
  modified_base 4: mod_base = OTHER; note = 2'-O-methyladenosine
  modified_base 5: mod_base = um
  modified_base 6: mod_base = gm
  modified_base 7: mod_base = OTHER; note = 2'-O-methyladenosine
  modified_base 8: mod_base = gm
  modified_base 9: mod_base = OTHER; note = 2'-fluoroadenosine
  modified_base 10: mod_base = OTHER; note = 2'-fluoroadenosine
  modified_base 11: mod_base = OTHER; note = 2'-fluorocytidine
  modified_base 12: mod_base = um
  modified_base 13: mod_base = OTHER; note = 2'-O-methyladenosine
  modified_base 14: mod_base = cm
  modified_base 15: mod_base = cm
  modified_base 16: mod_base = um
  modified_base 17: mod_base = OTHER; note = 2'-O-methylinosine
  modified_base 18: mod_base = um
  modified_base 19: mod_base = OTHER; note = 2'-O-methyladenosine
  modified_base 20: mod_base = cm
  modified_base 21: mod_base = OTHER; note = 2'-O-methyladenosine
  source 1..21: mol_type = other RNA
aggatgagaactacctntaca

SEQ ID NO: 1246 - RNA, 21 nt, synthetic construct
  modified_base 1: mod_base = cm
  modified_base 2: mod_base = um
  modified_base 3: mod_base = OTHER; note = 2'-O-methyladenosine
  modified_base 4: mod_base = cm
  modified_base 5: mod_base = cm
  modified_base 6: mod_base = um
  modified_base 7: mod_base = gm
  modified_base 8: mod_base = um
  modified_base 9: mod_base = OTHER; note = 2'-fluoroadenosine
  modified_base 10: mod_base = OTHER; note = 2'-fluorocytidine
  modified_base 11: mod_base = OTHER; note = 2'-fluorocytidine
  modified_base 12: mod_base = um
  modified_base 13: mod_base = gm
  modified_base 14: mod_base = gm
  modified_base 15: mod_base = um
  modified_base 16: mod_base = cm
  modified_base 17: mod_base = OTHER; note = 2'-O-methyladenosine
  modified_base 18: mod_base = um
  modified_base 19: mod_base = OTHER; note = 2'-O-methylinosine
  modified_base 20: mod_base = gm
  modified_base 21: mod_base = OTHER; note = 2'-O-methyladenosine
  source 1..21: mol_type = other RNA
ctacctgtacctggtcatnga

SEQ ID NO: 1247 - RNA, 21 nt, synthetic construct
  modified_base 1: mod_base = cm
  modified_base 2: mod_base = um
  modified_base 3: mod_base = OTHER; note = 2'-O-methyladenosine
  modified_base 4: mod_base = cm
  modified_base 5: mod_base = cm
  modified_base 6: mod_base = um
  modified_base 7: mod_base = gm
  modified_base 8: mod_base = um
  modified_base 9: mod_base = OTHER; note = 2'-fluoroadenosine
  modified_base 10: mod_base = OTHER; note = 2'-fluorocytidine
  modified_base 11: mod_base = OTHER; note = 2'-fluorocytidine
  modified_base 12: mod_base = um
  modified_base 13: mod_base = gm
  modified_base 14: mod_base = gm
  modified_base 15: mod_base = um
  modified_base 16: mod_base = um
  modified_base 17: mod_base = OTHER; note = 2'-O-methyladenosine
  modified_base 18: mod_base = um
  modified_base 19: mod_base = gm
  modified_base 20: mod_base = gm
  modified_base 21: mod_base = OTHER; note = 2'-O-methyladenosine
  source 1..21: mol_type = other RNA
ctacctgtacctggttatgga

SEQ ID NO: 1248 - RNA, 21 nt, synthetic construct
  modified_base 1: mod_base = OTHER; note = 2'-O-methyladenosine
  modified_base 2: mod_base = cm
  modified_base 3: mod_base = OTHER; note = 2'-O-methyladenosine
  modified_base 4: mod_base = cm
  modified_base 5: mod_base = um
  modified_base 6: mod_base = gm
  modified_base 7: mod_base = cm
  modified_base 8: mod_base = um
  modified_base 9: mod_base = OTHER; note = 2'-fluoroguanosine
  modified_base 10: mod_base = OTHER; note = 2'-fluoroadenosine
  modified_base 11: mod_base = OTHER; note = 2'-fluoroguanosine
  modified_base 12: mod_base = cm
  modified_base 13: mod_base = OTHER; note = 2'-O-methyladenosine
  modified_base 14: mod_base = OTHER; note = 2'-O-methyladenosine
  modified_base 15: mod_base = gm
  modified_base 16: mod_base = um
  modified_base 17: mod_base = um
  modified_base 18: mod_base = um
  modified_base 19: mod_base = OTHER; note = 2'-O-methylinosine
  modified_base 20: mod_base = gm
  modified_base 21: mod_base = OTHER; note = 2'-O-methyladenosine
  source 1..21: mol_type = other RNA
acactgctgagcaagtttnga

SEQ ID NO: 1249 - RNA, 21 nt, synthetic construct
  modified_base 1: mod_base = um
  modified_base 2: mod_base = gm
  modified_base 3: mod_base = cm
  modified_base 4: mod_base = cm
  modified_base 5: mod_base = OTHER; note = 2'-O-methyladenosine
  modified_base 6: mod_base = um
  modified_base 7: mod_base = gm
  modified_base 8: mod_base = OTHER; note = 2'-O-methyladenosine
  modified_base 9: mod_base = OTHER; note = 2'-fluoroadenosine
  modified_base 10: mod_base = OTHER; note = 2'-fluoroguanosine
  modified_base 11: mod_base = OTHER; note = 2'-fluoroadenosine
  modified_base 12: mod_base = um
  modified_base 13: mod_base = cm
  modified_base 14: mod_base = OTHER; note = 2'-O-methyladenosine
  modified_base 15: mod_base = um
  modified_base 16: mod_base = gm
  modified_base 17: mod_base = OTHER; note = 2'-O-methyladenosine
  modified_base 18: mod_base = OTHER; note = 2'-O-methyladenosine
  modified_base 19: mod_base = cm
  modified_base 20: mod_base = OTHER; note = 2'-O-methyladenosine
  modified_base 21: mod_base = OTHER; note = 2'-O-methyladenosine
  source 1..21: mol_type = other RNA
tgccatgaagatcatgaacaa

SEQ ID NO: 1250 - RNA, 21 nt, synthetic construct
  modified_base 1: mod_base = cm
  modified_base 2: mod_base = cm
  modified_base 3: mod_base = OTHER; note = 2'-O-methyladenosine
  modified_base 4: mod_base = um
  modified_base 5: mod_base = gm
  modified_base 6: mod_base = OTHER; note = 2'-O-methyladenosine
  modified_base 7: mod_base = OTHER; note = 2'-O-methyladenosine
  modified_base 8: mod_base = gm
  modified_base 9: mod_base = OTHER; note = 2'-fluoroadenosine
  modified_base 10: mod_base = OTHER; note = 2'-fluorouridine
  modified_base 11: mod_base = OTHER; note = 2'-fluorocytidine
  modified_base 12: mod_base = OTHER; note = 2'-O-methyladenosine
  modified_base 13: mod_base = um
  modified_base 14: mod_base = gm
  modified_base 15: mod_base = OTHER; note = 2'-O-methyladenosine
  modified_base 16: mod_base = OTHER; note = 2'-O-methyladenosine
  modified_base 17: mod_base = cm
  modified_base 18: mod_base = OTHER; note = 2'-O-methyladenosine
  modified_base 19: mod_base = OTHER; note = 2'-O-methyladenosine
  modified_base 20: mod_base = gm
  modified_base 21: mod_base = um
  source 1..21: mol_type = other RNA
ccatgaagatcatgaacaagt

SEQ ID NO: 1251 - RNA, 21 nt, synthetic construct
  modified_base 1: mod_base = cm
  modified_base 2: mod_base = OTHER; note = 2'-O-methyladenosine
  modified_base 3: mod_base = um
  modified_base 4: mod_base = gm
  modified_base 5: mod_base = OTHER; note = 2'-O-methyladenosine
  modified_base 6: mod_base = OTHER; note = 2'-O-methyladenosine
  modified_base 7: mod_base = gm
  modified_base 8: mod_base = OTHER; note = 2'-O-methyladenosine
  modified_base 9: mod_base = OTHER; note = 2'-fluorouridine
  modified_base 10: mod_base = OTHER; note = 2'-fluorocytidine
  modified_base 11: mod_base = OTHER; note = 2'-fluoroadenosine
  modified_base 12: mod_base = um
  modified_base 13: mod_base = gm
  modified_base 14: mod_base = OTHER; note = 2'-O-methyladenosine
  modified_base 15: mod_base = OTHER; note = 2'-O-methyladenosine
  modified_base 16: mod_base = cm
  modified_base 17: mod_base = OTHER; note = 2'-O-methyladenosine
  modified_base 18: mod_base = OTHER; note = 2'-O-methyladenosine
  modified_base 19: mod_base = gm
  modified_base 20: mod_base = um
  modified_base 21: mod_base = OTHER; note = 2'-O-methyladenosine
  source 1..21: mol_type = other RNA
catgaagatcatgaacaagta

SEQ ID NO: 1252 - RNA, 21 nt, synthetic construct
  modified_base 1: mod_base = um
  modified_base 2: mod_base = gm
  modified_base 3: mod_base = cm
  modified_base 4: mod_base = um
  modified_base 5: mod_base = gm
  modified_base 6: mod_base = OTHER; note = 2'-O-methyladenosine
  modified_base 7: mod_base = cm
  modified_base 8: mod_base = OTHER; note = 2'-O-methyladenosine
  modified_base 9: mod_base = OTHER; note = 2'-fluorocytidine
  modified_base 10: mod_base = OTHER; note = 2'-fluorouridine
  modified_base 11: mod_base = OTHER; note = 2'-fluoroguanosine
  modified_base 12: mod_base = cm
  modified_base 13: mod_base = um
  modified_base 14: mod_base = gm
  modified_base 15: mod_base = OTHER; note = 2'-O-methyladenosine
  modified_base 16: mod_base = OTHER; note = 2'-O-methylinosine
  modified_base 17: mod_base = cm
  modified_base 18: mod_base = OTHER; note = 2'-O-methyladenosine
  modified_base 19: mod_base = OTHER; note = 2'-O-methyladenosine
  modified_base 20: mod_base = gm
  modified_base 21: mod_base = um
  source 1..21: mol_type = other RNA
tgctgacactgctgancaagt

SEQ ID NO: 1253 - RNA, 21 nt, synthetic construct
  modified_base 1: mod_base = um
  modified_base 2: mod_base = gm
  modified_base 3: mod_base = OTHER; note = 2'-O-methyladenosine
  modified_base 4: mod_base = cm
  modified_base 5: mod_base = OTHER; note = 2'-O-methyladenosine
  modified_base 6: mod_base = cm
  modified_base 7: mod_base = um
  modified_base 8: mod_base = gm
  modified_base 9: mod_base = OTHER; note = 2'-fluorocytidine
  modified_base 10: mod_base = OTHER; note = 2'-fluorouridine
  modified_base 11: mod_base = OTHER; note = 2'-fluoroguanosine
  modified_base 12: mod_base = OTHER; note = 2'-O-methyladenosine
  modified_base 13: mod_base = gm
  modified_base 14: mod_base = cm
  modified_base 15: mod_base = OTHER; note = 2'-O-methyladenosine
  modified_base 16: mod_base = OTHER; note = 2'-O-methyladenosine
  modified_base 17: mod_base = gm
  modified_base 18: mod_base = um
  modified_base 19: mod_base = um
  modified_base 20: mod_base = um
  modified_base 21: mod_base = OTHER; note = 2'-O-methyladenosine
  source 1..21: mol_type = other RNA
tgacactgctgagcaagttta

SEQ ID NO: 1254 - RNA, 21 nt, synthetic construct
  modified_base 1: mod_base = gm
  modified_base 2: mod_base = cm
  modified_base 3: mod_base = OTHER; note = 2'-O-methyladenosine
  modified_base 4: mod_base = um
  modified_base 5: mod_base = cm
  modified_base 6: mod_base = OTHER; note = 2'-O-methyladenosine
  modified_base 7: mod_base = OTHER; note = 2'-O-methyladenosine
  modified_base 8: mod_base = OTHER; note = 2'-O-methyladenosine
  modified_base 9: mod_base = OTHER; note = 2'-fluorocytidine
  modified_base 10: mod_base = OTHER; note = 2'-fluorocytidine
  modified_base 11: mod_base = OTHER; note = 2'-fluorocytidine
  modified_base 12: mod_base = gm
  modified_base 13: mod_base = OTHER; note = 2'-O-methyladenosine
  modified_base 14: mod_base = cm
  modified_base 15: mod_base = OTHER; note = 2'-O-methyladenosine
  modified_base 16: mod_base = OTHER; note = 2'-O-methyladenosine
  modified_base 17: mod_base = cm
  modified_base 18: mod_base = OTHER; note = 2'-O-methyladenosine
  modified_base 19: mod_base = um
  modified_base 20: mod_base = cm
  modified_base 21: mod_base = OTHER; note = 2'-O-methyladenosine
  source 1..21: mol_type = other RNA
gcatcaaacccgacaacatca

SEQ ID NO: 1255 - RNA, 21 nt, synthetic construct
  modified_base 1: mod_base = gm
  modified_base 2: mod_base = cm
  modified_base 3: mod_base = OTHER; note = 2'-O-methyladenosine
  modified_base 4: mod_base = OTHER; note = 2'-O-methyladenosine
  modified_base 5: mod_base = OTHER; note = 2'-O-methyladenosine
  modified_base 6: mod_base = cm
  modified_base 7: mod_base = cm
  modified_base 8: mod_base = cm
  modified_base 9: mod_base = OTHER; note = 2'-fluoroguanosine
  modified_base 10: mod_base = OTHER; note = 2'-fluoroadenosine
  modified_base 11: mod_base = OTHER; note = 2'-fluorocytidine
  modified_base 12: mod_base = OTHER; note = 2'-O-methyladenosine
  modified_base 13: mod_base = OTHER; note = 2'-O-methyladenosine
  modified_base 14: mod_base = cm
  modified_base 15: mod_base = OTHER; note = 2'-O-methyladenosine
  modified_base 16: mod_base = um
  modified_base 17: mod_base = cm
  modified_base 18: mod_base = cm
  modified_base 19: mod_base = um
  modified_base 20: mod_base = OTHER; note = 2'-O-methylinosine
  modified_base 21: mod_base = OTHER; note = 2'-O-methyladenosine
  source 1..21: mol_type = other RNA
gcaaacccgacaacatcctna

SEQ ID NO: 1256 - RNA, 21 nt, synthetic construct
  modified_base 1: mod_base = gm
  modified_base 2: mod_base = cm
  modified_base 3: mod_base = OTHER; note = 2'-O-methyladenosine
  modified_base 4: mod_base = OTHER; note = 2'-O-methyladenosine
  modified_base 5: mod_base = OTHER; note = 2'-O-methyladenosine
  modified_base 6: mod_base = cm
  modified_base 7: mod_base = cm
  modified_base 8: mod_base = cm
  modified_base 9: mod_base = OTHER; note = 2'-fluoroguanosine
  modified_base 10: mod_base = OTHER; note = 2'-fluoroadenosine
  modified_base 11: mod_base = OTHER; note = 2'-fluorocytidine
  modified_base 12: mod_base = OTHER; note = 2'-O-methyladenosine
  modified_base 13: mod_base = OTHER; note = 2'-O-methyladenosine
  modified_base 14: mod_base = cm
  modified_base 15: mod_base = OTHER; note = 2'-O-methyladenosine
  modified_base 16: mod_base = um
  modified_base 17: mod_base = cm
  modified_base 18: mod_base = um
  modified_base 19: mod_base = um
  modified_base 20: mod_base = gm
  modified_base 21: mod_base = OTHER; note = 2'-O-methyladenosine
  source 1..21: mol_type = other RNA
gcaaacccgacaacatcttga

SEQ ID NO: 1257 - RNA, 21 nt, synthetic construct
  modified_base 1: mod_base = cm
  modified_base 2: mod_base = OTHER; note = 2'-O-methyladenosine
  modified_base 3: mod_base = OTHER; note = 2'-O-methyladenosine
  modified_base 4: mod_base = gm
  modified_base 5: mod_base = OTHER; note = 2'-O-methyladenosine
  modified_base 6: mod_base = um
  modified_base 7: mod_base = cm
  modified_base 8: mod_base = gm
  modified_base 9: mod_base = OTHER; note = 2'-fluorouridine
  modified_base 10: mod_base = OTHER; note = 2'-fluorocytidine
  modified_base 11: mod_base = OTHER; note = 2'-fluorocytidine
  modified_base 12: mod_base = OTHER; note = 2'-O-methyladenosine
  modified_base 13: mod_base = cm
  modified_base 14: mod_base = um
  modified_base 15: mod_base = OTHER; note = 2'-O-methyladenosine
  modified_base 16: mod_base = cm
  modified_base 17: mod_base = OTHER; note = 2'-O-methyladenosine
  modified_base 18: mod_base = OTHER; note = 2'-O-methyladenosine
  modified_base 19: mod_base = OTHER; note = 2'-O-methylinosine
  modified_base 20: mod_base = gm
  modified_base 21: mod_base = OTHER; note = 2'-O-methyladenosine
  source 1..21: mol_type = other RNA
caagatcgtccactacaanga

SEQ ID NO: 1258 - RNA, 21 nt, synthetic construct
  modified_base 1: mod_base = cm
  modified_base 2: mod_base = um
  modified_base 3: mod_base = OTHER; note = 2'-O-methyladenosine
  modified_base 4: mod_base = cm
  modified_base 5: mod_base = OTHER; note = 2'-O-methyladenosine
  modified_base 6: mod_base = OTHER; note = 2'-O-methyladenosine
  modified_base 7: mod_base = gm
  modified_base 8: mod_base = gm
  modified_base 9: mod_base = OTHER; note = 2'-fluoroadenosine
  modified_base 10: mod_base = OTHER; note = 2'-fluoroguanosine
  modified_base 11: mod_base = OTHER; note = 2'-fluorocytidine
  modified_base 12: mod_base = OTHER; note = 2'-O-methyladenosine
  modified_base 13: mod_base = cm
  modified_base 14: mod_base = cm
  modified_base 15: mod_base = um
  modified_base 16: mod_base = cm
  modified_base 17: mod_base = um
  modified_base 18: mod_base = um
  modified_base 19: mod_base = um
  modified_base 20: mod_base = cm
  modified_base 21: mod_base = um
  source 1..21: mol_type = other RNA
ctacaaggagcacctctttct

SEQ ID NO: 1259 - RNA, 21 nt, synthetic construct
  modified_base 1: mod_base = cm
  modified_base 2: mod_base = um
  modified_base 3: mod_base = OTHER; note = 2'-O-methyladenosine
  modified_base 4: mod_base = cm
  modified_base 5: mod_base = OTHER; note = 2'-O-methyladenosine
  modified_base 6: mod_base = OTHER; note = 2'-O-methyladenosine
  modified_base 7: mod_base = gm
  modified_base 8: mod_base = gm
  modified_base 9: mod_base = OTHER; note = 2'-fluoroadenosine
  modified_base 10: mod_base = OTHER; note = 2'-fluoroguanosine
  modified_base 11: mod_base = OTHER; note = 2'-fluorocytidine
  modified_base 12: mod_base = OTHER; note = 2'-O-methyladenosine
  modified_base 13: mod_base = cm
  modified_base 14: mod_base = cm
  modified_base 15: mod_base = um
  modified_base 16: mod_base = um
  modified_base 17: mod_base = um
  modified_base 18: mod_base = cm
  modified_base 19: mod_base = um
  modified_base 20: mod_base = cm
  modified_base 21: mod_base = um
  source 1..21: mol_type = other RNA
ctacaaggagcacctttctct

SEQ ID NO: 1260 - RNA, 21 nt, synthetic construct
  modified_base 1: mod_base = cm
  modified_base 2: mod_base = gm
  modified_base 3: mod_base = gm
  modified_base 4: mod_base = OTHER; note = 2'-O-methyladenosine
  modified_base 5: mod_base = cm
  modified_base 6: mod_base = OTHER; note = 2'-O-methyladenosine
  modified_base 7: mod_base = cm
  modified_base 8: mod_base = OTHER; note = 2'-O-methyladenosine
  modified_base 9: mod_base = OTHER; note = 2'-fluorouridine
  modified_base 10: mod_base = OTHER; note = 2'-fluorocytidine
  modified_base 11: mod_base = OTHER; note = 2'-fluorocytidine
  modified_base 12: mod_base = cm
  modified_base 13: mod_base = um
  modified_base 14: mod_base = um
  modified_base 15: mod_base = cm
  modified_base 16: mod_base = um
  modified_base 17: mod_base = um
  modified_base 18: mod_base = cm
  modified_base 19: mod_base = um
  modified_base 20: mod_base = um
  modified_base 21: mod_base = um
  source 1..21: mol_type = other RNA
cggacacatcccttcttcttt

SEQ ID NO: 1261 - RNA, 21 nt, synthetic construct
  modified_base 1: mod_base = gm
  modified_base 2: mod_base = OTHER; note = 2'-O-methyladenosine
  modified_base 3: mod_base = cm
  modified_base 4: mod_base = OTHER; note = 2'-O-methyladenosine
  modified_base 5: mod_base = cm
  modified_base 6: mod_base = OTHER; note = 2'-O-methyladenosine
  modified_base 7: mod_base = um
  modified_base 8: mod_base = cm
  modified_base 9: mod_base = OTHER; note = 2'-fluorocytidine
  modified_base 10: mod_base = OTHER; note = 2'-fluorocytidine
  modified_base 11: mod_base = OTHER; note = 2'-fluorouridine
  modified_base 12: mod_base = um
  modified_base 13: mod_base = cm
  modified_base 14: mod_base = um
  modified_base 15: mod_base = um
  modified_base 16: mod_base = cm
  modified_base 17: mod_base = um
  modified_base 18: mod_base = um
  modified_base 19: mod_base = um
  modified_base 20: mod_base = gm
  modified_base 21: mod_base = OTHER; note = 2'-O-methyladenosine
  source 1..21: mol_type = other RNA
gacacatcccttcttctttga

SEQ ID NO: 1262 - RNA, 21 nt, synthetic construct
  modified_base 1: mod_base = cm
  modified_base 2: mod_base = cm
  modified_base 3: mod_base = um
  modified_base 4: mod_base = um
  modified_base 5: mod_base = um
  modified_base 6: mod_base = OTHER; note = 2'-O-methyladenosine
  modified_base 7: mod_base = cm
  modified_base 8: mod_base = OTHER; note = 2'-O-methyladenosine
  modified_base 9: mod_base = OTHER; note = 2'-fluorocytidine
  modified_base 10: mod_base = OTHER; note = 2'-fluorocytidine
  modified_base 11: mod_base = OTHER; note = 2'-fluoroguanosine
  modified_base 12: mod_base = gm
  modified_base 13: mod_base = OTHER; note = 2'-O-methyladenosine
  modified_base 14: mod_base = um
  modified_base 15: mod_base = um
  modified_base 16: mod_base = um
  modified_base 17: mod_base = cm
  modified_base 18: mod_base = gm
  modified_base 19: mod_base = OTHER; note = 2'-O-methyladenosine
  modified_base 20: mod_base = OTHER; note = 2'-O-methyladenosine
  modified_base 21: mod_base = OTHER; note = 2'-O-methyladenosine
  source 1..21: mol_type = other RNA
cctttacaccggatttcgaaa

SEQ ID NO: 1263 - RNA, 21 nt, synthetic construct
  modified_base 1: mod_base = um
  modified_base 2: mod_base = OTHER; note = 2'-O-methyladenosine
  modified_base 3: mod_base = cm
  modified_base 4: mod_base = OTHER; note = 2'-O-methyladenosine
  modified_base 5: mod_base = cm
  modified_base 6: mod_base = cm
  modified_base 7: mod_base = gm
  modified_base 8: mod_base = gm
  modified_base 9: mod_base = OTHER; note = 2'-fluoroadenosine
  modified_base 10: mod_base = OTHER; note = 2'-fluorouridine
  modified_base 11: mod_base = OTHER; note = 2'-fluorouridine
  modified_base 12: mod_base = um
  modified_base 13: mod_base = cm
  modified_base 14: mod_base = gm
  modified_base 15: mod_base = OTHER; note = 2'-O-methyladenosine
  modified_base 16: mod_base = OTHER; note = 2'-O-methyladenosine
  modified_base 17: mod_base = gm
  modified_base 18: mod_base = OTHER; note = 2'-O-methylinosine
  modified_base 19: mod_base = um
  modified_base 20: mod_base = gm
  modified_base 21: mod_base = OTHER; note = 2'-O-methyladenosine
  source 1..21: mol_type = other RNA
tacaccggatttcgaagntga

SEQ ID NO: 1264 - RNA, 21 nt, synthetic construct
  modified_base 1: mod_base = cm
  modified_base 2: mod_base = OTHER; note = 2'-O-methyladenosine
  modified_base 3: mod_base = cm
  modified_base 4: mod_base = cm
  modified_base 5: mod_base = gm
  modified_base 6: mod_base = OTHER; note = 2'-O-methyladenosine
  modified_base 7: mod_base = cm
  modified_base 8: mod_base = OTHER; note = 2'-O-methyladenosine
  modified_base 9: mod_base = OTHER; note = 2'-fluorocytidine
  modified_base 10: mod_base = OTHER; note = 2'-fluoroadenosine
  modified_base 11: mod_base = OTHER; note = 2'-fluorouridine
  modified_base 12: mod_base = gm
  modified_base 13: mod_base = cm
  modified_base 14: mod_base = OTHER; note = 2'-O-methyladenosine
  modified_base 15: mod_base = OTHER; note = 2'-O-methyladenosine
  modified_base 16: mod_base = cm
  modified_base 17: mod_base = um
  modified_base 18: mod_base = um
  modified_base 19: mod_base = cm
  modified_base 20: mod_base = OTHER; note = 2'-O-methylinosine
  modified_base 21: mod_base = OTHER; note = 2'-O-methyladenosine
  source 1..21: mol_type = other RNA
caccgacacatgcaacttcna

SEQ ID NO: 1265 - RNA, 21 nt, synthetic construct
  modified_base 1: mod_base = cm
  modified_base 2: mod_base = cm
  modified_base 3: mod_base = gm
  modified_base 4: mod_base = OTHER; note = 2'-O-methyladenosine
  modified_base 5: mod_base = cm
  modified_base 6: mod_base = OTHER; note = 2'-O-methyladenosine
  modified_base 7: mod_base = cm
  modified_base 8: mod_base = OTHER; note = 2'-O-methyladenosine
  modified_base 9: mod_base = OTHER; note = 2'-fluorouridine
  modified_base 10: mod_base = OTHER; note = 2'-fluoroguanosine
  modified_base 11: mod_base = OTHER; note = 2'-fluorocytidine
  modified_base 12: mod_base = OTHER; note = 2'-O-methyladenosine
  modified_base 13: mod_base = OTHER; note = 2'-O-methyladenosine
  modified_base 14: mod_base = cm
  modified_base 15: mod_base = um
  modified_base 16: mod_base = um
  modified_base 17: mod_base = cm
  modified_base 18: mod_base = OTHER; note = 2'-O-methylinosine
  modified_base 19: mod_base = OTHER; note = 2'-O-methyladenosine
  modified_base 20: mod_base = cm
  modified_base 21: mod_base = um
  source 1..21: mol_type = other RNA
ccgacacatgcaacttcnact

SEQ ID NO: 1266 - RNA, 21 nt, synthetic construct
  modified_base 1: mod_base = OTHER; note = 2'-O-methyladenosine
  modified_base 2: mod_base = cm
  modified_base 3: mod_base = OTHER; note = 2'-O-methyladenosine
  modified_base 4: mod_base = um
  modified_base 5: mod_base = gm
  modified_base 6: mod_base = cm
  modified_base 7: mod_base = OTHER; note = 2'-O-methyladenosine
  modified_base 8: mod_base = OTHER; note = 2'-O-methyladenosine
  modified_base 9: mod_base = OTHER; note = 2'-fluorocytidine
  modified_base 10: mod_base = OTHER; note = 2'-fluorouridine
  modified_base 11: mod_base = OTHER; note = 2'-fluorouridine
  modified_base 12: mod_base = cm
  modified_base 13: mod_base = gm
  modified_base 14: mod_base = OTHER; note = 2'-O-methyladenosine
  modified_base 15: mod_base = cm
  modified_base 16: mod_base = um
  modified_base 17: mod_base = um
  modified_base 18: mod_base = OTHER; note = 2'-O-methylinosine
  modified_base 19: mod_base = gm
  modified_base 20: mod_base = um
  modified_base 21: mod_base = OTHER; note = 2'-O-methyladenosine
  source 1..21: mol_type = other RNA
acatgcaacttcgacttngta

SEQ ID NO: 1267 - RNA, 21 nt, synthetic construct
  modified_base 1: mod_base = cm
  modified_base 2: mod_base = cm
  modified_base 3: mod_base = um
  modified_base 4: mod_base = gm
  modified_base 5: mod_base = gm
  modified_base 6: mod_base = um
  modified_base 7: mod_base = cm
  modified_base 8: mod_base = OTHER; note = 2'-O-methyladenosine
  modified_base 9: mod_base = OTHER; note = 2'-fluorouridine
  modified_base 10: mod_base = gm
  modified_base 11: mod_base = OTHER; note = 2'-fluoroguanosine
  modified_base 12: mod_base = OTHER; note = 2'-fluoroadenosine
  modified_base 13: mod_base = gm
  modified_base 14: mod_base = um
  modified_base 15: mod_base = OTHER; note = 2'-O-methyladenosine
  modified_base 16: mod_base = um
  modified_base 17: mod_base = um
  modified_base 18: mod_base = OTHER; note = 2'-O-methyladenosine
  modified_base 19: mod_base = cm
  modified_base 20: mod_base = gm
  modified_base 21: mod_base = um
  source 1..21: mol_type = other RNA
cctggtcatggagtattacgt

SEQ ID NO: 1268 - RNA, 21 nt, synthetic construct
  modified_base 1: mod_base = cm
  modified_base 2: mod_base = OTHER; note = 2'-O-methyladenosine
  modified_base 3: mod_base = cm
  modified_base 4: mod_base = cm
  modified_base 5: mod_base = gm
  modified_base 6: mod_base = OTHER; note = 2'-O-methyladenosine
  modified_base 7: mod_base = cm
  modified_base 8: mod_base = OTHER; note = 2'-O-methyladenosine
  modified_base 9: mod_base = OTHER; note = 2'-fluorocytidine
  modified_base 10: mod_base = OTHER; note = 2'-fluoroadenosine
  modified_base 11: mod_base = OTHER; note = 2'-fluorouridine
  modified_base 12: mod_base = gm
  modified_base 13: mod_base = cm
  modified_base 14: mod_base = OTHER; note = 2'-O-methyladenosine
  modified_base 15: mod_base = OTHER; note = 2'-O-methyladenosine
  modified_base 16: mod_base = cm
  modified_base 17: mod_base = um
  modified_base 18: mod_base = um
  modified_base 19: mod_base = um
  modified_base 20: mod_base = gm
  modified_base 21: mod_base = OTHER; note = 2'-O-methyladenosine
  source 1..21: mol_type = other RNA
caccgacacatgcaactttga

SEQ ID NO: 1269 - RNA, 21 nt, synthetic construct
  modified_base 1: mod_base = cm
  modified_base 2: mod_base = OTHER; note = 2'-O-methyladenosine
  modified_base 3: mod_base = cm
  modified_base 4: mod_base = cm
  modified_base 5: mod_base = gm
  modified_base 6: mod_base = OTHER; note = 2'-O-methyladenosine
  modified_base 7: mod_base = cm
  modified_base 8: mod_base = OTHER; note = 2'-O-methyladenosine
  modified_base 9: mod_base = OTHER; note = 2'-fluorocytidine
  modified_base 10: mod_base = OTHER; note = 2'-O-methyladenosine
  modified_base 11: mod_base = OTHER; note = 2'-fluorouridine
  modified_base 12: mod_base = gm
  modified_base 13: mod_base = cm
  modified_base 14: mod_base = OTHER; note = 2'-O-methyladenosine
  modified_base 15: mod_base = OTHER; note = 2'-O-methyladenosine
  modified_base 16: mod_base = cm
  modified_base 17: mod_base = um
  modified_base 18: mod_base = um
  modified_base 19: mod_base = cm
  modified_base 20: mod_base = OTHER; note = 2'-O-methylinosine
  modified_base 21: mod_base = OTHER; note = 2'-O-methyladenosine
  source 1..21: mol_type = other RNA
caccgacacatgcaacttcna

SEQ ID NO: 1270 - RNA, 21 nt, synthetic construct
  modified_base 1: mod_base = cm
  modified_base 2: mod_base = OTHER; note = 2'-O-methyladenosine
  modified_base 3: mod_base = cm
  modified_base 4: mod_base = cm
  modified_base 5: mod_base = gm
  modified_base 6: mod_base = OTHER; note = 2'-O-methyladenosine
  modified_base 7: mod_base = OTHER; note = 2'-fluorocytidine
  modified_base 8: mod_base = OTHER; note = 2'-O-methyladenosine
  modified_base 9: mod_base = OTHER; note = 2'-fluorocytidine
  modified_base 10: mod_base = OTHER; note = 2'-O-methyladenosine
  modified_base 11: mod_base = OTHER; note = 2'-fluorouridine
  modified_base 12: mod_base = gm
  modified_base 13: mod_base = cm
  modified_base 14: mod_base = OTHER; note = 2'-O-methyladenosine
  modified_base 15: mod_base = OTHER; note = 2'-O-methyladenosine
  modified_base 16: mod_base = cm
  modified_base 17: mod_base = um
  modified_base 18: mod_base = um
  modified_base 19: mod_base = cm
  modified_base 20: mod_base = OTHER; note = 2'-O-methylinosine
  modified_base 21: mod_base = OTHER; note = 2'-O-methyladenosine
  source 1..21: mol_type = other RNA
caccgacacatgcaacttcna

SEQ ID NO: 1271 - RNA, 21 nt, synthetic construct
  modified_base 1: mod_base = cm
  modified_base 2: mod_base = cm
  modified_base 3: mod_base = um
  modified_base 4: mod_base = cm
  modified_base 5: mod_base = gm
  modified_base 6: mod_base = gm
  modified_base 7: mod_base = um
  modified_base 8: mod_base = OTHER; note = 2'-O-methyladenosine
  modified_base 9: mod_base = OTHER; note = 2'-fluorouridine
  modified_base 10: mod_base = OTHER; note = 2'-fluorouridine
  modified_base 11: mod_base = OTHER; note = 2'-fluorouridine
  modified_base 12: mod_base = OTHER; note = 2'-O-methyladenosine
  modified_base 13: mod_base = um
  modified_base 14: mod_base = um
  modified_base 15: mod_base = gm
  modified_base 16: mod_base = um
  modified_base 17: mod_base = um
  modified_base 18: mod_base = um
  modified_base 19: mod_base = gm
  modified_base 20: mod_base = um
  modified_base 21: mod_base = OTHER; note = 2'-O-methyladenosine
  source 1..21: mol_type = other RNA
cctcggtatttattgtttgta

SEQ ID NO: 1272 - RNA, 21 nt, synthetic construct
  modified_base 1: mod_base = cm
  modified_base 2: mod_base = cm
  modified_base 3: mod_base = um
  modified_base 4: mod_base = cm
  modified_base 5: mod_base = gm
  modified_base 6: mod_base = gm
  modified_base 7: mod_base = um
  modified_base 8: mod_base = OTHER; note = 2'-O-methyladenosine
  modified_base 9: mod_base = OTHER; note = 2'-fluorouridine
  modified_base 10: mod_base = OTHER; note = 2'-fluorouridine
  modified_base 11: mod_base = OTHER; note = 2'-fluorouridine
  modified_base 12: mod_base = OTHER; note = 2'-O-methyladenosine
  modified_base 13: mod_base = um
  modified_base 14: mod_base = um
  modified_base 15: mod_base = gm
  modified_base 16: mod_base = um
  modified_base 17: mod_base = cm
  modified_base 18: mod_base = um
  modified_base 19: mod_base = gm
  modified_base 20: mod_base = um
  modified_base 21: mod_base = OTHER; note = 2'-O-methyladenosine
  source 1..21: mol_type = other RNA
cctcggtatttattgtctgta

SEQ ID NO: 1273 - RNA, 21 nt, synthetic construct
  modified_base 1: mod_base = cm
  modified_base 2: mod_base = cm
  modified_base 3: mod_base = um
  modified_base 4: mod_base = cm
  modified_base 5: mod_base = gm
  modified_base 6: mod_base = gm
  modified_base 7: mod_base = um
  modified_base 8: mod_base = OTHER; note = 2'-O-methyladenosine
  modified_base 9: mod_base = OTHER; note = 2'-fluorouridine
  modified_base 10: mod_base = OTHER; note = 2'-fluorouridine
  modified_base 11: mod_base = OTHER; note = 2'-fluorouridine
  modified_base 12: mod_base = OTHER; note = 2'-O-methyladenosine
  modified_base 13: mod_base = um
  modified_base 14: mod_base = um
  modified_base 15: mod_base = gm
  modified_base 16: mod_base = um
  modified_base 17: mod_base = cm
  modified_base 18: mod_base = um
  modified_base 19: mod_base = OTHER; note = 2'-O-methylinosine
  modified_base 20: mod_base = um
  modified_base 21: mod_base = OTHER; note = 2'-O-methyladenosine
  source 1..21: mol_type = other RNA
cctcggtatttattgtctnta

SEQ ID NO: 1274 - RNA, 21 nt, synthetic construct
  modified_base 1: mod_base = cm
  modified_base 2: mod_base = cm
  modified_base 3: mod_base = um
  modified_base 4: mod_base = gm
  modified_base 5: mod_base = gm
  modified_base 6: mod_base = um
  modified_base 7: mod_base = cm
  modified_base 8: mod_base = OTHER; note = 2'-O-methyladenosine
  modified_base 9: mod_base = OTHER; note = 2'-fluorouridine
  modified_base 10: mod_base = gm
  modified_base 11: mod_base = OTHER; note = 2'-fluoroguanosine
  modified_base 12: mod_base = OTHER; note = 2'-fluoroadenosine
  modified_base 13: mod_base = gm
  modified_base 14: mod_base = um
  modified_base 15: mod_base = OTHER; note = 2'-O-methyladenosine
  modified_base 16: mod_base = um
  modified_base 17: mod_base = um
  modified_base 18: mod_base = OTHER; note = 2'-O-methyladenosine
  modified_base 19: mod_base = cm
  modified_base 20: mod_base = gm
  modified_base 21: mod_base = OTHER; note = 2'-O-methyladenosine
  source 1..21: mol_type = other RNA
cctggtcatggagtattacga

SEQ ID NO: 1275 - RNA, 19 nt, synthetic construct
  modified_base 1: mod_base = cm
  modified_base 1^2: mod_base = OTHER; note = phosphorothioate linkage
  modified_base 2: mod_base = cm
  modified_base 2^3: mod_base = OTHER; note = phosphorothioate linkage
  modified_base 3: mod_base = cm
  modified_base 4: mod_base = um
  modified_base 5: mod_base = OTHER; note = 2'-O-methyladenosine
  modified_base 6: mod_base = gm
  modified_base 7: mod_base = OTHER; note = 2'-fluoroadenosine
  modified_base 8: mod_base = OTHER; note = 2'-fluoroadenosine
  modified_base 9: mod_base = OTHER; note = 2'-fluorocytidine
  modified_base 10: mod_base = um
  modified_base 11: mod_base = gm
  modified_base 12: mod_base = um
  modified_base 13: mod_base = cm
  modified_base 14: mod_base = um
  modified_base 15: mod_base = um
  modified_base 16: mod_base = cm
  modified_base 17: mod_base = gm
  modified_base 17^18: mod_base = OTHER; note = phosphorothioate linkage
  modified_base 18: mod_base = OTHER; note = 2'-O-methyladenosine
  modified_base 18^19: mod_base = OTHER; note = phosphorothioate linkage
  modified_base 19: mod_base = OTHER; note = 2'-O-methyladenosine
  source 1..19: mol_type = other RNA
ccctagaactgtcttcgaa

SEQ ID NO: 1276 - RNA, 21 nt, synthetic construct
  modified_base 1: mod_base = um
  modified_base 2: mod_base = um
  modified_base 3: mod_base = cm
  modified_base 4: mod_base = cm
  modified_base 5: mod_base = um
  modified_base 6: mod_base = cm
  modified_base 7: mod_base = gm
  modified_base 8: mod_base = gm
  modified_base 9: mod_base = OTHER; note = 2'-fluorouridine
  modified_base 10: mod_base = OTHER; note = 2'-O-methyladenosine
  modified_base 11: mod_base = OTHER; note = 2'-fluorouridine
  modified_base 12: mod_base = OTHER; note = 2'-fluorouridine
  modified_base 13: mod_base = um
  modified_base 14: mod_base = OTHER; note = 2'-O-methyladenosine
  modified_base 15: mod_base = um
  modified_base 16: mod_base = um
  modified_base 17: mod_base = gm
  modified_base 18: mod_base = um
  modified_base 19: mod_base = cm
  modified_base 20: mod_base = um
  modified_base 21: mod_base = OTHER; note = 2'-O-methyladenosine
  source 1..21: mol_type = other RNA
ttcctcggtatttattgtcta

SEQ ID NO: 1277 - RNA, 21 nt, synthetic construct
  modified_base 1: mod_base = cm
  modified_base 2: mod_base = OTHER; note = 2'-O-methyladenosine
  modified_base 3: mod_base = cm
  modified_base 4: mod_base = cm
  modified_base 5: mod_base = gm
  modified_base 6: mod_base = OTHER; note = 2'-O-methyladenosine
  modified_base 7: mod_base = cm
  modified_base 8: mod_base = OTHER; note = 2'-O-methyladenosine
  modified_base 9: mod_base = OTHER; note = 2'-fluorocytidine
  modified_base 10: mod_base = OTHER; note = 2'-O-methyladenosine
  modified_base 11: mod_base = OTHER; note = 2'-fluorouridine
  modified_base 12: mod_base = gm
  modified_base 13: mod_base = OTHER; note = 2'-fluorocytidine
  modified_base 14: mod_base = OTHER; note = 2'-O-methyladenosine
  modified_base 15: mod_base = OTHER; note = 2'-O-methyladenosine
  modified_base 16: mod_base = cm
  modified_base 17: mod_base = um
  modified_base 18: mod_base = um
  modified_base 19: mod_base = cm
  modified_base 20: mod_base = OTHER; note = 2'-O-methylinosine
  modified_base 21: mod_base = OTHER; note = 2'-O-methyladenosine
  source 1..21: mol_type = other RNA
caccgacacatgcaacttcna

SEQ ID NO: 1278 - RNA, 21 nt, synthetic construct
  modified_base 1: mod_base = gm
  modified_base 2: mod_base = OTHER; note = 2'-O-methyladenosine
  modified_base 3: mod_base = cm
  modified_base 4: mod_base = cm
  modified_base 5: mod_base = cm
  modified_base 6: mod_base = um
  modified_base 7: mod_base = OTHER; note = 2'-O-methyladenosine
  modified_base 8: mod_base = gm
  modified_base 9: mod_base = OTHER; note = 2'-fluoroadenosine
  modified_base 10: mod_base = OTHER; note = 2'-fluoroadenosine
  modified_base 11: mod_base = OTHER; note = 2'-fluorocytidine
  modified_base 12: mod_base = um
  modified_base 13: mod_base = gm
  modified_base 14: mod_base = um
  modified_base 15: mod_base = cm
  modified_base 16: mod_base = um
  modified_base 17: mod_base = um
  modified_base 18: mod_base = cm
  modified_base 19: mod_base = OTHER; note = 2'-O-methylinosine
  modified_base 20: mod_base = OTHER; note = 2'-O-methyladenosine
  modified_base 21: mod_base = OTHER; note = 2'-O-methyladenosine
  source 1..21: mol_type = other RNA
gaccctagaactgtcttcnaa

SEQ ID NO: 1279 - RNA, 21 nt, synthetic construct
  modified_base 1: mod_base = gm
  modified_base 2: mod_base = OTHER; note = 2'-O-methyladenosine
  modified_base 3: mod_base = OTHER; note = 2'-O-methyladenosine
  modified_base 4: mod_base = cm
  modified_base 5: mod_base = cm
  modified_base 6: mod_base = cm
  modified_base 7: mod_base = um
  modified_base 8: mod_base = OTHER; note = 2'-O-methyladenosine
  modified_base 9: mod_base = OTHER; note = 2'-fluoroguanosine
  modified_base 10: mod_base = OTHER; note = 2'-fluoroadenosine
  modified_base 11: mod_base = OTHER; note = 2'-fluoroadenosine
  modified_base 12: mod_base = cm
  modified_base 13: mod_base = um
  modified_base 14: mod_base = gm
  modified_base 15: mod_base = um
  modified_base 16: mod_base = cm
  modified_base 17: mod_base = um
  modified_base 18: mod_base = um
  modified_base 19: mod_base = cm
  modified_base 20: mod_base = OTHER; note = 2'-O-methylinosine
  modified_base 21: mod_base = OTHER; note = 2'-O-methyladenosine
  source 1..21: mol_type = other RNA
gaaccctagaactgtcttcna

SEQ ID NO: 1280 - RNA, 21 nt, synthetic construct
  modified_base 1: mod_base = um
  modified_base 2: mod_base = gm
  modified_base 3: mod_base = gm
  modified_base 4: mod_base = cm
  modified_base 5: mod_base = OTHER; note = 2'-O-methyladenosine
  modified_base 6: mod_base = OTHER; note = 2'-O-methyladenosine
  modified_base 7: mod_base = gm
  modified_base 8: mod_base = OTHER; note = 2'-O-methyladenosine
  modified_base 9: mod_base = OTHER; note = 2'-fluorouridine
  modified_base 10: mod_base = cm
  modified_base 11: mod_base = OTHER; note = 2'-fluoroguanosine
  modified_base 12: mod_base = OTHER; note = 2'-fluorouridine
  modified_base 13: mod_base = cm
  modified_base 14: mod_base = cm
  modified_base 15: mod_base = OTHER; note = 2'-O-methyladenosine
  modified_base 16: mod_base = cm
  modified_base 17: mod_base = um
  modified_base 18: mod_base = OTHER; note = 2'-O-methyladenosine
  modified_base 19: mod_base = cm
  modified_base 20: mod_base = OTHER; note = 2'-O-methyladenosine
  modified_base 21: mod_base = OTHER; note = 2'-O-methyladenosine
  source 1..21: mol_type = other RNA
tggcaagatcgtccactacaa

SEQ ID NO: 1281 - RNA, 21 nt, synthetic construct
  modified_base 1: mod_base = um
  modified_base 2: mod_base = gm
  modified_base 3: mod_base = gm
  modified_base 4: mod_base = cm
  modified_base 5: mod_base = OTHER; note = 2'-O-methyladenosine
  modified_base 6: mod_base = OTHER; note = 2'-O-methyladenosine
  modified_base 7: mod_base = gm
  modified_base 8: mod_base = OTHER; note = 2'-O-methyladenosine
  modified_base 9: mod_base = OTHER; note = 2'-fluorouridine
  modified_base 10: mod_base = cm
  modified_base 11: mod_base = OTHER; note = 2'-fluoroguanosine
  modified_base 12: mod_base = um
  modified_base 13: mod_base = OTHER; note = 2'-fluorocytidine
  modified_base 14: mod_base = cm
  modified_base 15: mod_base = OTHER; note = 2'-O-methyladenosine
  modified_base 16: mod_base = cm
  modified_base 17: mod_base = um
  modified_base 18: mod_base = OTHER; note = 2'-O-methyladenosine
  modified_base 19: mod_base = cm
  modified_base 20: mod_base = OTHER; note = 2'-O-methyladenosine
  modified_base 21: mod_base = OTHER; note = 2'-O-methyladenosine
  source 1..21: mol_type = other RNA
tggcaagatcgtccactacaa

SEQ ID NO: 1282 - RNA, 21 nt, synthetic construct
  modified_base 1: mod_base = cm
  modified_base 2: mod_base = cm
  modified_base 3: mod_base = um
  modified_base 4: mod_base = gm
  modified_base 5: mod_base = gm
  modified_base 6: mod_base = um
  modified_base 7: mod_base = cm
  modified_base 8: mod_base = OTHER; note = 2'-O-methyladenosine
  modified_base 9: mod_base = OTHER; note = 2'-fluorouridine
  modified_base 10: mod_base = gm
  modified_base 11: mod_base = OTHER; note = 2'-fluoroguanosine
  modified_base 12: mod_base = OTHER; note = 2'-fluoroadenosine
  modified_base 13: mod_base = gm
  modified_base 14: mod_base = um
  modified_base 15: mod_base = OTHER; note = 2'-O-methyladenosine
  modified_base 16: mod_base = um
  modified_base 17: mod_base = um
  modified_base 18: mod_base = OTHER; note = 2'-O-methyladenosine
  modified_base 19: mod_base = cm
  modified_base 20: mod_base = gm
  modified_base 21: mod_base = OTHER; note = 2'-O-methyladenosine
  source 1..21: mol_type = other RNA
cctggtcatggagtattacga

SEQ ID NO: 1283 - RNA, 19 nt, synthetic construct
  modified_base 1: mod_base = cm
  modified_base 1^2: mod_base = OTHER; note = phosphorothioate linkage
  modified_base 2: mod_base = cm
  modified_base 2^3: mod_base = OTHER; note = phosphorothioate linkage
  modified_base 3: mod_base = cm
  modified_base 4: mod_base = um
  modified_base 5: mod_base = OTHER; note = 2'-O-methyladenosine
  modified_base 6: mod_base = gm
  modified_base 7: mod_base = OTHER; note = 2'-fluoroadenosine
  modified_base 8: mod_base = OTHER; note = 2'-fluoroadenosine
  modified_base 9: mod_base = OTHER; note = 2'-fluorocytidine
  modified_base 10: mod_base = um
  modified_base 11: mod_base = gm
  modified_base 12: mod_base = um
  modified_base 13: mod_base = cm
  modified_base 14: mod_base = um
  modified_base 15: mod_base = um
  modified_base 16: mod_base = cm
  modified_base 17: mod_base = gm
  modified_base 17^18: mod_base = OTHER; note = phosphorothioate linkage
  modified_base 18: mod_base = OTHER; note = 2'-O-methyladenosine
  modified_base 18^19: mod_base = OTHER; note = phosphorothioate linkage
  modified_base 19: mod_base = OTHER; note = 2'-O-methyladenosine
  source 1..19: mol_type = other RNA
ccctagaactgtcttcgaa

SEQ ID NO: 1284 - RNA, 21 nt, synthetic construct
  modified_base 1: mod_base = cm
  modified_base 2: mod_base = cm
  modified_base 3: mod_base = um
  modified_base 4: mod_base = cm
  modified_base 5: mod_base = gm
  modified_base 6: mod_base = gm
  modified_base 7: mod_base = um
  modified_base 8: mod_base = OTHER; note = 2'-O-methyladenosine
  modified_base 9: mod_base = OTHER; note = 2'-fluorouridine
  modified_base 10: mod_base = um
  modified_base 11: mod_base = OTHER; note = 2'-fluorouridine
  modified_base 12: mod_base = OTHER; note = 2'-O-methyladenosine
  modified_base 13: mod_base = OTHER; note = 2'-fluorouridine
  modified_base 14: mod_base = um
  modified_base 15: mod_base = gm
  modified_base 16: mod_base = um
  modified_base 17: mod_base = cm
  modified_base 18: mod_base = um
  modified_base 19: mod_base = gm
  modified_base 20: mod_base = um
  modified_base 21: mod_base = OTHER; note = 2'-O-methyladenosine
  source 1..21: mol_type = other RNA
cctcggtatttattgtctgta

SEQ ID NO: 1285 - RNA, 21 nt, synthetic construct
  modified_base 1: mod_base = cm
  modified_base 2: mod_base = cm
  modified_base 3: mod_base = um
  modified_base 4: mod_base = cm
  modified_base 5: mod_base = gm
  modified_base 6: mod_base = gm
  modified_base 7: mod_base = um
  modified_base 8: mod_base = OTHER; note = 2'-O-methyladenosine
  modified_base 9: mod_base = OTHER; note = 2'-fluorouridine
  modified_base 10: mod_base = um
  modified_base 11: mod_base = OTHER; note = 2'-fluorouridine
  modified_base 12: mod_base = OTHER; note = 2'-fluoroadenosine
  modified_base 13: mod_base = um
  modified_base 14: mod_base = um
  modified_base 15: mod_base = gm
  modified_base 16: mod_base = um
  modified_base 17: mod_base = cm
  modified_base 18: mod_base = um
  modified_base 19: mod_base = gm
  modified_base 20: mod_base = um
  modified_base 21: mod_base = OTHER; note = 2'-O-methyladenosine
  source 1..21: mol_type = other RNA
cctcggtatttattgtctgta

SEQ ID NO: 1286 - RNA, 21 nt, synthetic construct
  modified_base 1: mod_base = um
  modified_base 2: mod_base = um
  modified_base 3: mod_base = cm
  modified_base 4: mod_base = cm
  modified_base 5: mod_base = um
  modified_base 6: mod_base = cm
  modified_base 7: mod_base = gm
  modified_base 8: mod_base = gm
  modified_base 9: mod_base = OTHER; note = 2'-fluorouridine
  modified_base 10: mod_base = OTHER; note = 2'-O-methyladenosine
  modified_base 11: mod_base = OTHER; note = 2'-fluorouridine
  modified_base 12: mod_base = OTHER; note = 2'-fluorouridine
  modified_base 13: mod_base = um
  modified_base 14: mod_base = OTHER; note = 2'-O-methyladenosine
  modified_base 15: mod_base = um
  modified_base 16: mod_base = um
  modified_base 17: mod_base = gm
  modified_base 18: mod_base = um
  modified_base 19: mod_base = cm
  modified_base 20: mod_base = um
  modified_base 21: mod_base = OTHER; note = 2'-O-methyladenosine
  source 1..21: mol_type = other RNA
ttcctcggtatttattgtcta

SEQ ID NO: 1287 - RNA, 21 nt, synthetic construct
  modified_base 1: mod_base = cm
  modified_base 2: mod_base = cm
  modified_base 3: mod_base = um
  modified_base 4: mod_base = gm
  modified_base 5: mod_base = gm
  modified_base 6: mod_base = um
  modified_base 7: mod_base = cm
  modified_base 8: mod_base = OTHER; note = 2'-O-methyladenosine
  modified_base 9: mod_base = OTHER; note = 2'-fluorouridine
  modified_base 10: mod_base = gm
  modified_base 11: mod_base = OTHER; note = 2'-fluoroguanosine
  modified_base 12: mod_base = OTHER; note = 2'-fluoroadenosine
  modified_base 13: mod_base = gm
  modified_base 14: mod_base = um
  modified_base 15: mod_base = OTHER; note = 2'-O-methyladenosine
  modified_base 16: mod_base = um
  modified_base 17: mod_base = um
  modified_base 18: mod_base = OTHER; note = 2'-O-methyladenosine
  modified_base 19: mod_base = cm
  modified_base 20: mod_base = gm
  modified_base 21: mod_base = OTHER; note = 2'-O-methyladenosine
  source 1..21: mol_type = other RNA
cctggtcatggagtattacga

SEQ ID NO: 1288 - RNA, 22 nt, synthetic construct
  modified_base 1: mod_base = um
  modified_base 2: mod_base = um
  modified_base 3: mod_base = cm
  modified_base 4: mod_base = cm
  modified_base 5: mod_base = um
  modified_base 6: mod_base = cm
  modified_base 7: mod_base = gm
  modified_base 8: mod_base = gm
  modified_base 9: mod_base = OTHER; note = 2'-fluorouridine
  modified_base 10: mod_base = OTHER; note = 2'-O-methyladenosine
  modified_base 11: mod_base = OTHER; note = 2'-fluorouridine
  modified_base 12: mod_base = OTHER; note = 2'-fluorouridine
  modified_base 13: mod_base = um
  modified_base 14: mod_base = OTHER; note = 2'-O-methyladenosine
  modified_base 15: mod_base = um
  modified_base 16: mod_base = um
  modified_base 17: mod_base = gm
  modified_base 18: mod_base = um
  modified_base 19: mod_base = cm
  modified_base 20: mod_base = um
  modified_base 21: mod_base = OTHER; note = 2'-O-propargyladenosine
  source 1..22: mol_type = other RNA
ttcctcggtatttattgtctaa

SEQ ID NO: 1289 - RNA, 22 nt, synthetic construct
  modified_base 1: mod_base = um
  modified_base 2: mod_base = um
  modified_base 3: mod_base = cm
  modified_base 4: mod_base = cm
  modified_base 5: mod_base = um
  modified_base 6: mod_base = cm
  modified_base 7: mod_base = gm
  modified_base 8: mod_base = gm
  modified_base 9: mod_base = OTHER; note = 2'-fluorouridine
  modified_base 10: mod_base = OTHER; note = 2'-O-methyladenosine
  modified_base 11: mod_base = OTHER; note = 2'-fluorouridine
  modified_base 12: mod_base = OTHER; note = 2'-fluorouridine
  modified_base 13: mod_base = um
  modified_base 14: mod_base = OTHER; note = 2'-O-methyladenosine
  modified_base 15: mod_base = um
  modified_base 16: mod_base = um
  modified_base 17: mod_base = gm
  modified_base 18: mod_base = um
  modified_base 19: mod_base = cm
  modified_base 20: mod_base = um
  modified_base 20^21: mod_base = OTHER; note = phosphorothioate linkage
  modified_base 21: mod_base = OTHER; note = 2'-O-propargyladenosine
  source 1..22: mol_type = other RNA
ttcctcggtatttattgtctaa

SEQ ID NO: 1290 - RNA, 21 nt, synthetic construct
  modified_base 1: mod_base = um
  modified_base 2: mod_base = um
  modified_base 3: mod_base = cm
  modified_base 4: mod_base = cm
  modified_base 5: mod_base = um
  modified_base 6: mod_base = cm
  modified_base 7: mod_base = gm
  modified_base 8: mod_base = gm
  modified_base 9: mod_base = OTHER; note = 2'-fluorouridine
  modified_base 10: mod_base = OTHER; note = 2'-O-methyladenosine
  modified_base 11: mod_base = OTHER; note = 2'-fluorouridine
  modified_base 12: mod_base = OTHER; note = 2'-fluorouridine
  modified_base 13: mod_base = um
  modified_base 14: mod_base = OTHER; note = 2'-O-methyladenosine
  modified_base 15: mod_base = um
  modified_base 16: mod_base = um
  modified_base 17: mod_base = gm
  modified_base 18: mod_base = um
  modified_base 19: mod_base = cm
  modified_base 20: mod_base = um
  modified_base 21: mod_base = OTHER; note = 2'-O-methyladenosine
  source 1..21: mol_type = other RNA
ttcctcggtatttattgtcta

SEQ ID NO: 1291 - RNA, 21 nt, synthetic construct
  modified_base 1: mod_base = gm
  modified_base 2: mod_base = gm
  modified_base 3: mod_base = OTHER; note = 2'-O-methyladenosine
  modified_base 4: mod_base = um
  modified_base 5: mod_base = gm
  modified_base 6: mod_base = OTHER; note = 2'-O-methyladenosine
  modified_base 7: mod_base = OTHER; note = 2'-O-methyladenosine
  modified_base 8: mod_base = OTHER; note = 2'-O-methyladenosine
  modified_base 9: mod_base = OTHER; note = 2'-fluorocytidine
  modified_base 10: mod_base = OTHER; note = 2'-fluoroadenosine
  modified_base 11: mod_base = OTHER; note = 2'-fluoroguanosine
  modified_base 12: mod_base = cm
  modified_base 13: mod_base = um
  modified_base 14: mod_base = gm
  modified_base 15: mod_base = OTHER; note = 2'-O-methyladenosine
  modified_base 16: mod_base = OTHER; note = 2'-O-methyladenosine
  modified_base 17: mod_base = gm
  modified_base 18: mod_base = um
  modified_base 19: mod_base = OTHER; note = 2'-O-methylinosine
  modified_base 20: mod_base = gm
  modified_base 21: mod_base = OTHER; note = 2'-O-methyladenosine
  source 1..21: mol_type = other RNA
ggatgaaacagctgaagtnga

SEQ ID NO: 1292 - RNA, 21 nt, synthetic construct
  modified_base 1: mod_base = um
  modified_base 2: mod_base = cm
  modified_base 3: mod_base = cm
  modified_base 4: mod_base = cm
  modified_base 5: mod_base = um
  modified_base 6: mod_base = gm
  modified_base 7: mod_base = OTHER; note = 2'-O-methyladenosine
  modified_base 8: mod_base = OTHER; note = 2'-O-methyladenosine
  modified_base 9: mod_base = OTHER; note = 2'-fluorocytidine
  modified_base 10: mod_base = OTHER; note = 2'-fluorocytidine
  modified_base 11: mod_base = OTHER; note = 2'-fluorocytidine
  modified_base 12: mod_base = um
  modified_base 13: mod_base = OTHER; note = 2'-O-methyladenosine
  modified_base 14: mod_base = gm
  modified_base 15: mod_base = OTHER; note = 2'-O-methyladenosine
  modified_base 16: mod_base = OTHER; note = 2'-O-methyladenosine
  modified_base 17: mod_base = cm
  modified_base 18: mod_base = um
  modified_base 19: mod_base = gm
  modified_base 20: mod_base = um
  modified_base 21: mod_base = OTHER; note = 2'-O-methyladenosine
  source 1..21: mol_type = other RNA
tccctgaaccctagaactgta

SEQ ID NO: 1293 - RNA, 21 nt, synthetic construct
  modified_base 1: mod_base = gm
  modified_base 2: mod_base = OTHER; note = 2'-O-methyladenosine
  modified_base 3: mod_base = OTHER; note = 2'-O-methyladenosine
  modified_base 4: mod_base = cm
  modified_base 5: mod_base = cm
  modified_base 6: mod_base = cm
  modified_base 7: mod_base = um
  modified_base 8: mod_base = OTHER; note = 2'-O-methyladenosine
  modified_base 9: mod_base = OTHER; note = 2'-fluoroguanosine
  modified_base 10: mod_base = OTHER; note = 2'-fluoroadenosine
  modified_base 11: mod_base = OTHER; note = 2'-fluoroadenosine
  modified_base 12: mod_base = cm
  modified_base 13: mod_base = um
  modified_base 14: mod_base = gm
  modified_base 15: mod_base = um
  modified_base 16: mod_base = cm
  modified_base 17: mod_base = um
  modified_base 18: mod_base = um
  modified_base 19: mod_base = cm
  modified_base 20: mod_base = OTHER; note = 2'-O-methylinosine
  modified_base 21: mod_base = OTHER; note = 2'-O-methyladenosine
  source 1..21: mol_type = other RNA
gaaccctagaactgtcttcna

SEQ ID NO: 1294 - RNA, 21 nt, synthetic construct
  modified_base 1: mod_base = gm
  modified_base 2: mod_base = OTHER; note = 2'-O-methyladenosine
  modified_base 3: mod_base = cm
  modified_base 4: mod_base = cm
  modified_base 5: mod_base = cm
  modified_base 6: mod_base = um
  modified_base 7: mod_base = OTHER; note = 2'-O-methyladenosine
  modified_base 8: mod_base = gm
  modified_base 9: mod_base = OTHER; note = 2'-fluoroadenosine
  modified_base 10: mod_base = OTHER; note = 2'-fluoroadenosine
  modified_base 11: mod_base = OTHER; note = 2'-fluorocytidine
  modified_base 12: mod_base = um
  modified_base 13: mod_base = gm
  modified_base 14: mod_base = um
  modified_base 15: mod_base = cm
  modified_base 16: mod_base = um
  modified_base 17: mod_base = um
  modified_base 18: mod_base = cm
  modified_base 19: mod_base = OTHER; note = 2'-O-methylinosine
  modified_base 20: mod_base = OTHER; note = 2'-O-methyladenosine
  modified_base 21: mod_base = OTHER; note = 2'-O-methyladenosine
  source 1..21: mol_type = other RNA
gaccctagaactgtcttcnaa

SEQ ID NO: 1295 - RNA, 21 nt, synthetic construct
  modified_base 1: mod_base = OTHER; note = 2'-O-methyladenosine
  modified_base 2: mod_base = cm
  modified_base 3: mod_base = cm
  modified_base 4: mod_base = cm
  modified_base 5: mod_base = um
  modified_base 6: mod_base = OTHER; note = 2'-O-methyladenosine
  modified_base 7: mod_base = gm
  modified_base 8: mod_base = OTHER; note = 2'-O-methyladenosine
  modified_base 9: mod_base = OTHER; note = 2'-fluoroadenosine
  modified_base 10: mod_base = OTHER; note = 2'-fluorocytidine
  modified_base 11: mod_base = OTHER; note = 2'-fluorouridine
  modified_base 12: mod_base = gm
  modified_base 13: mod_base = um
  modified_base 14: mod_base = cm
  modified_base 15: mod_base = um
  modified_base 16: mod_base = um
  modified_base 17: mod_base = cm
  modified_base 18: mod_base = OTHER; note = 2'-O-methylinosine
  modified_base 19: mod_base = OTHER; note = 2'-O-methyladenosine
  modified_base 20: mod_base = cm
  modified_base 21: mod_base = um
  source 1..21: mol_type = other RNA
accctagaactgtcttcnact

SEQ ID NO: 1296 - RNA, 21 nt, synthetic construct
  modified_base 1: mod_base = cm
  modified_base 2: mod_base = cm
  modified_base 3: mod_base = cm
  modified_base 4: mod_base = um
  modified_base 5: mod_base = OTHER; note = 2'-O-methyladenosine
  modified_base 6: mod_base = gm
  modified_base 7: mod_base = OTHER; note = 2'-O-methyladenosine
  modified_base 8: mod_base = OTHER; note = 2'-O-methyladenosine
  modified_base 9: mod_base = OTHER; note = 2'-fluorocytidine
  modified_base 10: mod_base = OTHER; note = 2'-fluorouridine
  modified_base 11: mod_base = OTHER; note = 2'-fluoroguanosine
  modified_base 12: mod_base = um
  modified_base 13: mod_base = cm
  modified_base 14: mod_base = um
  modified_base 15: mod_base = um
  modified_base 16: mod_base = cm
  modified_base 17: mod_base = OTHER; note = 2'-O-methylinosine
  modified_base 18: mod_base = OTHER; note = 2'-O-methyladenosine
  modified_base 19: mod_base = cm
  modified_base 20: mod_base = um
  modified_base 21: mod_base = OTHER; note = 2'-O-methyladenosine
  source 1..21: mol_type = other RNA
ccctagaactgtcttcnacta

SEQ ID NO: 1297 - RNA, 21 nt, synthetic construct
  modified_base 1: mod_base = um
  modified_base 2: mod_base = gm
  modified_base 3: mod_base = cm
  modified_base 4: mod_base = um
  modified_base 5: mod_base = um
  modified_base 6: mod_base = OTHER; note = 2'-O-methyladenosine
  modified_base 7: mod_base = cm
  modified_base 8: mod_base = um
  modified_base 9: mod_base = OTHER; note = 2'-fluorocytidine
  modified_base 10: mod_base = OTHER; note = 2'-fluoroguanosine
  modified_base 11: mod_base = OTHER; note = 2'-fluoroguanosine
  modified_base 12: mod_base = gm
  modified_base 13: mod_base = OTHER; note = 2'-O-methyladenosine
  modified_base 14: mod_base = OTHER; note = 2'-O-methyladenosine
  modified_base 15: mod_base = OTHER; note = 2'-O-methyladenosine
  modified_base 16: mod_base = um
  modified_base 17: mod_base = um
  modified_base 18: mod_base = um
  modified_base 19: mod_base = gm
  modified_base 20: mod_base = cm
  modified_base 21: mod_base = um
  source 1..21: mol_type = other RNA
tgcttactcgggaaatttgct

SEQ ID NO: 1298 - RNA, 21 nt, synthetic construct
  modified_base 1: mod_base = cm
  modified_base 2: mod_base = gm
  modified_base 3: mod_base = gm
  modified_base 4: mod_base = gm
  modified_base 5: mod_base = OTHER; note = 2'-O-methyladenosine
  modified_base 6: mod_base = OTHER; note = 2'-O-methyladenosine
  modified_base 7: mod_base = OTHER; note = 2'-O-methyladenosine
  modified_base 8: mod_base = um
  modified_base 9: mod_base = OTHER; note = 2'-fluorouridine
  modified_base 10: mod_base = OTHER; note = 2'-fluorouridine
  modified_base 11: mod_base = OTHER; note = 2'-fluoroguanosine
  modified_base 12: mod_base = cm
  modified_base 13: mod_base = um
  modified_base 14: mod_base = um
  modified_base 15: mod_base = um
  modified_base 16: mod_base = um
  modified_base 17: mod_base = OTHER; note = 2'-O-methylinosine
  modified_base 18: mod_base = cm
  modified_base 19: mod_base = cm
  modified_base 20: mod_base = OTHER; note = 2'-O-methyladenosine
  modified_base 21: mod_base = OTHER; note = 2'-O-methyladenosine
  source 1..21: mol_type = other RNA
cgggaaatttgcttttnccaa

SEQ ID NO: 1299 - RNA, 21 nt, synthetic construct
  modified_base 1: mod_base = OTHER; note = 2'-O-methyladenosine
  modified_base 2: mod_base = cm
  modified_base 3: mod_base = cm
  modified_base 4: mod_base = cm
  modified_base 5: mod_base = cm
  modified_base 6: mod_base = OTHER; note = 2'-O-methyladenosine
  modified_base 7: mod_base = OTHER; note = 2'-O-methyladenosine
  modified_base 8: mod_base = um
  modified_base 9: mod_base = OTHER; note = 2'-fluorocytidine
  modified_base 10: mod_base = OTHER; note = 2'-fluorocytidine
  modified_base 11: mod_base = OTHER; note = 2'-fluoroadenosine
  modified_base 12: mod_base = cm
  modified_base 13: mod_base = gm
  modified_base 14: mod_base = um
  modified_base 15: mod_base = um
  modified_base 16: mod_base = um
  modified_base 17: mod_base = um
  modified_base 18: mod_base = gm
  modified_base 19: mod_base = gm
  modified_base 20: mod_base = OTHER; note = 2'-O-methyladenosine
  modified_base 21: mod_base = um
  source 1..21: mol_type = other RNA
accccaatccacgttttggat

SEQ ID NO: 1300 - RNA, 21 nt, synthetic construct
  modified_base 1: mod_base = cm
  modified_base 2: mod_base = cm
  modified_base 3: mod_base = cm
  modified_base 4: mod_base = OTHER; note = 2'-O-methyladenosine
  modified_base 5: mod_base = OTHER; note = 2'-O-methyladenosine
  modified_base 6: mod_base = um
  modified_base 7: mod_base = cm
  modified_base 8: mod_base = cm
  modified_base 9: mod_base = OTHER; note = 2'-fluoroadenosine
  modified_base 10: mod_base = OTHER; note = 2'-fluorocytidine
  modified_base 11: mod_base = OTHER; note = 2'-fluoroguanosine
  modified_base 12: mod_base = um
  modified_base 13: mod_base = um
  modified_base 14: mod_base = um
  modified_base 15: mod_base = um
  modified_base 16: mod_base = gm
  modified_base 17: mod_base = OTHER; note = 2'-O-methylinosine
  modified_base 18: mod_base = OTHER; note = 2'-O-methyladenosine
  modified_base 19: mod_base = um
  modified_base 20: mod_base = gm
  modified_base 21: mod_base = OTHER; note = 2'-O-methyladenosine
  source 1..21: mol_type = other RNA
cccaatccacgttttgnatga

SEQ ID NO: 1301 - RNA, 21 nt, synthetic construct
  modified_base 1: mod_base = gm
  modified_base 2: mod_base = OTHER; note = 2'-O-methyladenosine
  modified_base 3: mod_base = gm
  modified_base 4: mod_base = gm
  modified_base 5: mod_base = gm
  modified_base 6: mod_base = OTHER; note = 2'-O-methyladenosine
  modified_base 7: mod_base = cm
  modified_base 8: mod_base = gm
  modified_base 9: mod_base = OTHER; note = 2'-fluorouridine
  modified_base 10: mod_base = OTHER; note = 2'-fluoroguanosine
  modified_base 11: mod_base = OTHER; note = 2'-fluorouridine
  modified_base 12: mod_base = um
  modified_base 13: mod_base = gm
  modified_base 14: mod_base = gm
  modified_base 15: mod_base = um
  modified_base 16: mod_base = OTHER; note = 2'-O-methylinosine
  modified_base 17: mod_base = OTHER; note = 2'-O-methyladenosine
  modified_base 18: mod_base = OTHER; note = 2'-O-methyladenosine
  modified_base 19: mod_base = um
  modified_base 20: mod_base = gm
  modified_base 21: mod_base = OTHER; note = 2'-O-methyladenosine
  source 1..21: mol_type = other RNA
gagggacgtgttggtnaatga

SEQ ID NO: 1302 - RNA, 21 nt, synthetic construct
  modified_base 1: mod_base = gm
  modified_base 2: mod_base = gm
  modified_base 3: mod_base = OTHER; note = 2'-O-methyladenosine
  modified_base 4: mod_base = um
  modified_base 5: mod_base = gm
  modified_base 6: mod_base = OTHER; note = 2'-O-methyladenosine
  modified_base 7: mod_base = gm
  modified_base 8: mod_base = OTHER; note = 2'-O-methyladenosine
  modified_base 9: mod_base = OTHER; note = 2'-fluoroadenosine
  modified_base 10: mod_base = OTHER; note = 2'-fluorocytidine
  modified_base 11: mod_base = OTHER; note = 2'-fluorouridine
  modified_base 12: mod_base = OTHER; note = 2'-O-methyladenosine
  modified_base 13: mod_base = cm
  modified_base 14: mod_base = cm
  modified_base 15: mod_base = um
  modified_base 16: mod_base = OTHER; note = 2'-O-methylinosine
  modified_base 17: mod_base = um
  modified_base 18: mod_base = OTHER; note = 2'-O-methyladenosine
  modified_base 19: mod_base = cm
  modified_base 20: mod_base = cm
  modified_base 21: mod_base = um
  source 1..21: mol_type = other RNA
ggatgagaactacctntacct

SEQ ID NO: 1303 - RNA, 21 nt, synthetic construct
  modified_base 1: mod_base = cm
  modified_base 2: mod_base = cm
  modified_base 3: mod_base = um
  modified_base 4: mod_base = gm
  modified_base 5: mod_base = gm
  modified_base 6: mod_base = um
  modified_base 7: mod_base = cm
  modified_base 8: mod_base = OTHER; note = 2'-O-methyladenosine
  modified_base 9: mod_base = OTHER; note = 2'-fluorouridine
  modified_base 10: mod_base = OTHER; note = 2'-fluoroguanosine
  modified_base 11: mod_base = OTHER; note = 2'-fluoroguanosine
  modified_base 12: mod_base = OTHER; note = 2'-O-methyladenosine
  modified_base 13: mod_base = gm
  modified_base 14: mod_base = um
  modified_base 15: mod_base = OTHER; note = 2'-O-methyladenosine
  modified_base 16: mod_base = um
  modified_base 17: mod_base = um
  modified_base 18: mod_base = OTHER; note = 2'-O-methyladenosine
  modified_base 19: mod_base = cm
  modified_base 20: mod_base = gm
  modified_base 21: mod_base = um
  source 1..21: mol_type = other RNA
cctggtcatggagtattacgt

SEQ ID NO: 1304 - RNA, 21 nt, synthetic construct
  modified_base 1: mod_base = gm
  modified_base 2: mod_base = gm
  modified_base 3: mod_base = OTHER; note = 2'-O-methyladenosine
  modified_base 4: mod_base = cm
  modified_base 5: mod_base = OTHER; note = 2'-O-methyladenosine
  modified_base 6: mod_base = um
  modified_base 7: mod_base = cm
  modified_base 8: mod_base = OTHER; note = 2'-O-methyladenosine
  modified_base 9: mod_base = OTHER; note = 2'-fluoroadenosine
  modified_base 10: mod_base = OTHER; note = 2'-fluoroadenosine
  modified_base 11: mod_base = OTHER; note = 2'-fluorocytidine
  modified_base 12: mod_base = cm
  modified_base 13: mod_base = cm
  modified_base 14: mod_base = gm
  modified_base 15: mod_base = OTHER; note = 2'-O-methyladenosine
  modified_base 16: mod_base = cm
  modified_base 17: mod_base = OTHER; note = 2'-O-methyladenosine
  modified_base 18: mod_base = OTHER; note = 2'-O-methyladenosine
  modified_base 19: mod_base = cm
  modified_base 20: mod_base = OTHER; note = 2'-O-methyladenosine
  modified_base 21: mod_base = um
  source 1..21: mol_type = other RNA
ggacatcaaacccgacaacat

SEQ ID NO: 1305 - RNA, 21 nt, synthetic construct
  modified_base 1: mod_base = gm
  modified_base 2: mod_base = gm
  modified_base 3: mod_base = OTHER; note = 2'-O-methyladenosine
  modified_base 4: mod_base = cm
  modified_base 5: mod_base = OTHER; note = 2'-O-methyladenosine
  modified_base 6: mod_base = um
  modified_base 7: mod_base = cm
  modified_base 8: mod_base = OTHER; note = 2'-O-methyladenosine
  modified_base 9: mod_base = OTHER; note = 2'-fluoroadenosine
  modified_base 10: mod_base = OTHER; note = 2'-fluoroadenosine
  modified_base 11: mod_base = OTHER; note = 2'-fluorocytidine
  modified_base 12: mod_base = cm
  modified_base 13: mod_base = cm
  modified_base 14: mod_base = gm
  modified_base 15: mod_base = OTHER; note = 2'-O-methyladenosine
  modified_base 16: mod_base = um
  modified_base 17: mod_base = OTHER; note = 2'-O-methyladenosine
  modified_base 18: mod_base = OTHER; note = 2'-O-methyladenosine
  modified_base 19: mod_base = cm
  modified_base 20: mod_base = OTHER; note = 2'-O-methyladenosine
  modified_base 21: mod_base = um
  source 1..21: mol_type = other RNA
ggacatcaaacccgataacat

SEQ ID NO: 1306 - RNA, 21 nt, synthetic construct
  modified_base 1: mod_base = um
  modified_base 2: mod_base = gm
  modified_base 3: mod_base = gm
  modified_base 4: mod_base = cm
  modified_base 5: mod_base = OTHER; note = 2'-O-methyladenosine
  modified_base 6: mod_base = OTHER; note = 2'-O-methyladenosine
  modified_base 7: mod_base = gm
  modified_base 8: mod_base = OTHER; note = 2'-O-methyladenosine
  modified_base 9: mod_base = OTHER; note = 2'-fluorouridine
  modified_base 10: mod_base = OTHER; note = 2'-fluorocytidine
  modified_base 11: mod_base = OTHER; note = 2'-fluoroguanosine
  modified_base 12: mod_base = um
  modified_base 13: mod_base = cm
  modified_base 14: mod_base = cm
  modified_base 15: mod_base = OTHER; note = 2'-O-methyladenosine
  modified_base 16: mod_base = cm
  modified_base 17: mod_base = um
  modified_base 18: mod_base = OTHER; note = 2'-O-methyladenosine
  modified_base 19: mod_base = cm
  modified_base 20: mod_base = OTHER; note = 2'-O-methyladenosine
  modified_base 21: mod_base = OTHER; note = 2'-O-methyladenosine
  source 1..21: mol_type = other RNA
tggcaagatcgtccactacaa

SEQ ID NO: 1307 - RNA, 21 nt, synthetic construct
  modified_base 1: mod_base = um
  modified_base 2: mod_base = gm
  modified_base 3: mod_base = gm
  modified_base 4: mod_base = cm
  modified_base 5: mod_base = OTHER; note = 2'-O-methyladenosine
  modified_base 6: mod_base = OTHER; note = 2'-O-methyladenosine
  modified_base 7: mod_base = gm
  modified_base 8: mod_base = OTHER; note = 2'-O-methyladenosine
  modified_base 9: mod_base = OTHER; note = 2'-fluorouridine
  modified_base 10: mod_base = OTHER; note = 2'-fluorocytidine
  modified_base 11: mod_base = OTHER; note = 2'-fluoroguanosine
  modified_base 12: mod_base = um
  modified_base 13: mod_base = cm
  modified_base 14: mod_base = cm
  modified_base 15: mod_base = OTHER; note = 2'-O-methyladenosine
  modified_base 16: mod_base = um
  modified_base 17: mod_base = um
  modified_base 18: mod_base = OTHER; note = 2'-O-methyladenosine
  modified_base 19: mod_base = cm
  modified_base 20: mod_base = OTHER; note = 2'-O-methyladenosine
  modified_base 21: mod_base = OTHER; note = 2'-O-methyladenosine
  source 1..21: mol_type = other RNA
tggcaagatcgtccattacaa

SEQ ID NO: 1308 - RNA, 21 nt, synthetic construct
  modified_base 1: mod_base = cm
  modified_base 2: mod_base = cm
  modified_base 3: mod_base = cm
  modified_base 4: mod_base = cm
  modified_base 5: mod_base = um
  modified_base 6: mod_base = um
  modified_base 7: mod_base = um
  modified_base 8: mod_base = OTHER; note = 2'-O-methyladenosine
  modified_base 9: mod_base = OTHER; note = 2'-fluorocytidine
  modified_base 10: mod_base = OTHER; note = 2'-fluoroadenosine
  modified_base 11: mod_base = OTHER; note = 2'-fluorocytidine
  modified_base 12: mod_base = cm
  modified_base 13: mod_base = gm
  modified_base 14: mod_base = gm
  modified_base 15: mod_base = OTHER; note = 2'-O-methyladenosine
  modified_base 16: mod_base = um
  modified_base 17: mod_base = um
  modified_base 18: mod_base = um
  modified_base 19: mod_base = cm
  modified_base 20: mod_base = gm
  modified_base 21: mod_base = OTHER; note = 2'-O-methyladenosine
  source 1..21: mol_type = other RNA
cccctttacaccggatttcga

SEQ ID NO: 1309 - RNA, 21 nt, synthetic construct
  modified_base 1: mod_base = cm
  modified_base 2: mod_base = gm
  modified_base 3: mod_base = OTHER; note = 2'-O-methyladenosine
  modified_base 4: mod_base = cm
  modified_base 5: mod_base = OTHER; note = 2'-O-methyladenosine
  modified_base 6: mod_base = cm
  modified_base 7: mod_base = OTHER; note = 2'-O-methyladenosine
  modified_base 8: mod_base = um
  modified_base 9: mod_base = OTHER; note = 2'-fluoroguanosine
  modified_base 10: mod_base = OTHER; note = 2'-fluorocytidine
  modified_base 11: mod_base = OTHER; note = 2'-fluoroadenosine
  modified_base 12: mod_base = OTHER; note = 2'-O-methyladenosine
  modified_base 13: mod_base = cm
  modified_base 14: mod_base = um
  modified_base 15: mod_base = um
  modified_base 16: mod_base = cm
  modified_base 17: mod_base = OTHER; note = 2'-O-methylinosine
  modified_base 18: mod_base = OTHER; note = 2'-O-methyladenosine
  modified_base 19: mod_base = cm
  modified_base 20: mod_base = um
  modified_base 21: mod_base = um
  source 1..21: mol_type = other RNA
cgacacatgcaacttcnactt

SEQ ID NO: 1310 - RNA, 21 nt, synthetic construct
  modified_base 1: mod_base = gm
  modified_base 2: mod_base = gm
  modified_base 3: mod_base = OTHER; note = 2'-O-methyladenosine
  modified_base 4: mod_base = OTHER; note = 2'-O-methyladenosine
  modified_base 5: mod_base = cm
  modified_base 6: mod_base = cm
  modified_base 7: mod_base = cm
  modified_base 8: mod_base = um
  modified_base 9: mod_base = OTHER; note = 2'-fluoroadenosine
  modified_base 10: mod_base = OTHER; note = 2'-fluoroguanosine
  modified_base 11: mod_base = OTHER; note = 2'-fluoroadenosine
  modified_base 12: mod_base = OTHER; note = 2'-O-methyladenosine
  modified_base 13: mod_base = cm
  modified_base 14: mod_base = um
  modified_base 15: mod_base = gm
  modified_base 16: mod_base = um
  modified_base 17: mod_base = cm
  modified_base 18: mod_base = um
  modified_base 19: mod_base = um
  modified_base 20: mod_base = cm
  modified_base 21: mod_base = OTHER; note = 2'-O-methyladenosine
  source 1..21: mol_type = other RNA
ggaaccctagaactgtcttca

SEQ ID NO: 1311 - RNA, 21 nt, synthetic construct
  modified_base 1: mod_base = gm
  modified_base 2: mod_base = gm
  modified_base 3: mod_base = OTHER; note = 2'-O-methyladenosine
  modified_base 4: mod_base = OTHER; note = 2'-O-methyladenosine
  modified_base 5: mod_base = cm
  modified_base 6: mod_base = cm
  modified_base 7: mod_base = cm
  modified_base 8: mod_base = um
  modified_base 9: mod_base = OTHER; note = 2'-fluoroadenosine
  modified_base 10: mod_base = OTHER; note = 2'-fluoroguanosine
  modified_base 11: mod_base = OTHER; note = 2'-fluoroadenosine
  modified_base 12: mod_base = OTHER; note = 2'-O-methyladenosine
  modified_base 13: mod_base = cm
  modified_base 14: mod_base = um
  modified_base 15: mod_base = gm
  modified_base 16: mod_base = um
  modified_base 17: mod_base = um
  modified_base 18: mod_base = um
  modified_base 19: mod_base = um
  modified_base 20: mod_base = cm
  modified_base 21: mod_base = OTHER; note = 2'-O-methyladenosine
  source 1..21: mol_type = other RNA
ggaaccctagaactgttttca

SEQ ID NO: 1312 - RNA, 21 nt, synthetic construct
  modified_base 1: mod_base = cm
  modified_base 2: mod_base = um
  modified_base 3: mod_base = gm
  modified_base 4: mod_base = cm
  modified_base 5: mod_base = um
  modified_base 6: mod_base = um
  modified_base 7: mod_base = OTHER; note = 2'-O-methyladenosine
  modified_base 8: mod_base = cm
  modified_base 9: mod_base = OTHER; note = 2'-fluorouridine
  modified_base 10: mod_base = OTHER; note = 2'-fluorocytidine
  modified_base 11: mod_base = OTHER; note = 2'-fluoroguanosine
  modified_base 12: mod_base = gm
  modified_base 13: mod_base = gm
  modified_base 14: mod_base = OTHER; note = 2'-O-methyladenosine
  modified_base 15: mod_base = OTHER; note = 2'-O-methyladenosine
  modified_base 16: mod_base = OTHER; note = 2'-O-methyladenosine
  modified_base 17: mod_base = um
  modified_base 18: mod_base = um
  modified_base 19: mod_base = um
  modified_base 20: mod_base = gm
  modified_base 21: mod_base = OTHER; note = 2'-O-methyladenosine
  source 1..21: mol_type = other RNA
ctgcttactcgggaaatttga

SEQ ID NO: 1313 - RNA, 21 nt, synthetic construct
  modified_base 1: mod_base = gm
  modified_base 2: mod_base = cm
  modified_base 3: mod_base = gm
  modified_base 4: mod_base = gm
  modified_base 5: mod_base = um
  modified_base 6: mod_base = um
  modified_base 7: mod_base = um
  modified_base 8: mod_base = gm
  modified_base 9: mod_base = OTHER; note = 2'-fluoroguanosine
  modified_base 10: mod_base = OTHER; note = 2'-O-methyl-2-aminoadenosine
  modified_base 11: mod_base = OTHER; note = 2'-fluorouridine
  modified_base 12: mod_base = OTHER; note = 2'-O-methyladenosine
  modified_base 13: mod_base = OTHER; note = 2'-fluorouridine
  modified_base 14: mod_base = um
  modified_base 15: mod_base = um
  modified_base 16: mod_base = OTHER; note = 2'-O-methyladenosine
  modified_base 17: mod_base = um
  modified_base 18: mod_base = um
  modified_base 19: mod_base = gm
  modified_base 20: mod_base = OTHER; note = 2'-O-methyladenosine
  modified_base 21: mod_base = OTHER; note = 2'-O-methyladenosine
  source 1..21: mol_type = other RNA
gcggtttggntatttattgaa

SEQ ID NO: 1314 - RNA, 21 nt, synthetic construct
  modified_base 1: mod_base = gm
  modified_base 2: mod_base = cm
  modified_base 3: mod_base = OTHER; note = 2'-O-methyladenosine
  modified_base 4: mod_base = um
  modified_base 5: mod_base = um
  modified_base 6: mod_base = cm
  modified_base 7: mod_base = cm
  modified_base 8: mod_base = um
  modified_base 9: mod_base = OTHER; note = 2'-fluorocytidine
  modified_base 10: mod_base = OTHER; note = 2'-fluoroguanosine
  modified_base 11: mod_base = OTHER; note = 2'-fluoroguanosine
  modified_base 12: mod_base = um
  modified_base 13: mod_base = OTHER; note = 2'-O-methyladenosine
  modified_base 14: mod_base = um
  modified_base 15: mod_base = um
  modified_base 16: mod_base = um
  modified_base 17: mod_base = OTHER; note = 2'-O-methyladenosine
  modified_base 18: mod_base = um
  modified_base 19: mod_base = um
  modified_base 20: mod_base = gm
  modified_base 21: mod_base = um
  source 1..21: mol_type = other RNA
gcattcctcggtatttattgt

SEQ ID NO: 1315 - RNA, 21 nt, synthetic construct
  modified_base 1: mod_base = gm
  modified_base 2: mod_base = cm
  modified_base 3: mod_base = OTHER; note = 2'-O-methyladenosine
  modified_base 4: mod_base = um
  modified_base 5: mod_base = um
  modified_base 6: mod_base = cm
  modified_base 7: mod_base = cm
  modified_base 8: mod_base = um
  modified_base 9: mod_base = OTHER; note = 2'-fluorocytidine
  modified_base 10: mod_base = OTHER; note = 2'-fluoroguanosine
  modified_base 11: mod_base = OTHER; note = 2'-fluoroguanosine
  modified_base 12: mod_base = um
  modified_base 13: mod_base = OTHER; note = 2'-O-methyladenosine
  modified_base 14: mod_base = um
  modified_base 15: mod_base = um
  modified_base 16: mod_base = um
  modified_base 17: mod_base = OTHER; note = 2'-O-methyl-2-aminoadenosine
  modified_base 18: mod_base = um
  modified_base 19: mod_base = um
  modified_base 20: mod_base = gm
  modified_base 21: mod_base = um
  source 1..21: mol_type = other RNA
gcattcctcggtatttnttgt

SEQ ID NO: 1316 - RNA, 21 nt, synthetic construct
  modified_base 1: mod_base = gm
  modified_base 2: mod_base = OTHER; note = 2'-O-methyladenosine
  modified_base 3: mod_base = cm
  modified_base 4: mod_base = cm
  modified_base 5: mod_base = cm
  modified_base 6: mod_base = um
  modified_base 7: mod_base = cm
  modified_base 8: mod_base = gm
  modified_base 9: mod_base = OTHER; note = 2'-fluorocytidine
  modified_base 10: mod_base = OTHER; note = 2'-fluoroguanosine
  modified_base 11: mod_base = OTHER; note = 2'-fluoroadenosine
  modified_base 12: mod_base = OTHER; note = 2'-O-methyladenosine
  modified_base 13: mod_base = um
  modified_base 14: mod_base = OTHER; note = 2'-O-methyladenosine
  modified_base 15: mod_base = OTHER; note = 2'-O-methyladenosine
  modified_base 16: mod_base = OTHER; note = 2'-O-methyladenosine
  modified_base 17: mod_base = OTHER; note = 2'-O-methyladenosine
  modified_base 18: mod_base = gm
  modified_base 19: mod_base = OTHER; note = 2'-O-methylinosine
  modified_base 20: mod_base = cm
  modified_base 21: mod_base = OTHER; note = 2'-O-methyladenosine
  source 1..21: mol_type = other RNA
gaccctcgcgaataaaagnca

SEQ ID NO: 1317 - RNA, 21 nt, synthetic construct
  modified_base 1: mod_base = OTHER; note = 2'-O-methyladenosine
  modified_base 2: mod_base = gm
  modified_base 3: mod_base = gm
  modified_base 4: mod_base = gm
  modified_base 5: mod_base = gm
  modified_base 6: mod_base = cm
  modified_base 7: mod_base = gm
  modified_base 8: mod_base = OTHER; note = 2'-O-methyladenosine
  modified_base 9: mod_base = OTHER; note = 2'-fluoroguanosine
  modified_base 10: mod_base = OTHER; note = 2'-fluoroguanosine
  modified_base 11: mod_base = OTHER; note = 2'-fluorouridine
  modified_base 12: mod_base = gm
  modified_base 13: mod_base = um
  modified_base 14: mod_base = cm
  modified_base 15: mod_base = gm
  modified_base 16: mod_base = um
  modified_base 17: mod_base = gm
  modified_base 18: mod_base = cm
  modified_base 19: mod_base = um
  modified_base 20: mod_base = um
  modified_base 21: mod_base = OTHER; note = 2'-O-methyladenosine
  source 1..21: mol_type = other RNA
aggggcgaggtgtcgtgctta

SEQ ID NO: 1318 - RNA, 21 nt, synthetic construct
  modified_base 1: mod_base = gm
  modified_base 2: mod_base = gm
  modified_base 3: mod_base = cm
  modified_base 4: mod_base = OTHER; note = 2'-O-methyladenosine
  modified_base 5: mod_base = gm
  modified_base 6: mod_base = OTHER; note = 2'-O-methyladenosine
  modified_base 7: mod_base = cm
  modified_base 8: mod_base = gm
  modified_base 9: mod_base = OTHER; note = 2'-fluorocytidine
  modified_base 10: mod_base = OTHER; note = 2'-fluorocytidine
  modified_base 11: mod_base = OTHER; note = 2'-fluorocytidine
  modified_base 12: mod_base = um
  modified_base 13: mod_base = um
  modified_base 14: mod_base = cm
  modified_base 15: mod_base = um
  modified_base 16: mod_base = OTHER; note = 2'-O-methyladenosine
  modified_base 17: mod_base = cm
  modified_base 18: mod_base = gm
  modified_base 19: mod_base = cm
  modified_base 20: mod_base = gm
  modified_base 21: mod_base = OTHER; note = 2'-O-methyladenosine
  source 1..21: mol_type = other RNA
ggcagacgcccttctacgcga

SEQ ID NO: 1319 - RNA, 21 nt, synthetic construct
  modified_base 1: mod_base = gm
  modified_base 2: mod_base = gm
  modified_base 3: mod_base = cm
  modified_base 4: mod_base = OTHER; note = 2'-O-methyladenosine
  modified_base 5: mod_base = gm
  modified_base 6: mod_base = OTHER; note = 2'-O-methyladenosine
  modified_base 7: mod_base = cm
  modified_base 8: mod_base = cm
  modified_base 9: mod_base = OTHER; note = 2'-fluorocytidine
  modified_base 10: mod_base = OTHER; note = 2'-fluorocytidine
  modified_base 11: mod_base = OTHER; note = 2'-fluorocytidine
  modified_base 12: mod_base = um
  modified_base 13: mod_base = um
  modified_base 14: mod_base = cm
  modified_base 15: mod_base = um
  modified_base 16: mod_base = OTHER; note = 2'-O-methyladenosine
  modified_base 17: mod_base = cm
  modified_base 18: mod_base = gm
  modified_base 19: mod_base = cm
  modified_base 20: mod_base = gm
  modified_base 21: mod_base = OTHER; note = 2'-O-methyladenosine
  source 1..21: mol_type = other RNA
ggcagacccccttctacgcga

SEQ ID NO: 1320 - RNA, 21 nt, synthetic construct
  modified_base 1: mod_base = cm
  modified_base 2: mod_base = cm
  modified_base 3: mod_base = cm
  modified_base 4: mod_base = cm
  modified_base 5: mod_base = gm
  modified_base 6: mod_base = OTHER; note = 2'-O-methyladenosine
  modified_base 7: mod_base = cm
  modified_base 8: mod_base = OTHER; note = 2'-O-methyladenosine
  modified_base 9: mod_base = OTHER; note = 2'-fluorouridine
  modified_base 10: mod_base = OTHER; note = 2'-fluorouridine
  modified_base 11: mod_base = OTHER; note = 2'-fluorocytidine
  modified_base 12: mod_base = cm
  modified_base 13: mod_base = um
  modified_base 14: mod_base = cm
  modified_base 15: mod_base = gm
  modified_base 16: mod_base = gm
  modified_base 17: mod_base = um
  modified_base 18: mod_base = OTHER; note = 2'-O-methyladenosine
  modified_base 19: mod_base = um
  modified_base 20: mod_base = um
  modified_base 21: mod_base = OTHER; note = 2'-O-methyladenosine
  source 1..21: mol_type = other RNA
ccccgacattcctcggtatta

SEQ ID NO: 1321 - RNA, 21 nt, synthetic construct
  modified_base 1: mod_base = um
  modified_base 2: mod_base = um
  modified_base 3: mod_base = cm
  modified_base 4: mod_base = cm
  modified_base 5: mod_base = um
  modified_base 6: mod_base = cm
  modified_base 7: mod_base = gm
  modified_base 8: mod_base = gm
  modified_base 9: mod_base = OTHER; note = 2'-fluorouridine
  modified_base 10: mod_base = OTHER; note = 2'-fluoroadenosine
  modified_base 11: mod_base = OTHER; note = 2'-fluorouridine
  modified_base 12: mod_base = um
  modified_base 13: mod_base = um
  modified_base 14: mod_base = OTHER; note = 2'-O-methyladenosine
  modified_base 15: mod_base = um
  modified_base 16: mod_base = um
  modified_base 17: mod_base = gm
  modified_base 18: mod_base = um
  modified_base 19: mod_base = cm
  modified_base 20: mod_base = um
  modified_base 21: mod_base = OTHER; note = 2'-O-methyladenosine
  source 1..21: mol_type = other RNA
ttcctcggtatttattgtcta

SEQ ID NO: 1322 - RNA, 21 nt, synthetic construct
  modified_base 1: mod_base = gm
  modified_base 2: mod_base = cm
  modified_base 3: mod_base = gm
  modified_base 4: mod_base = OTHER; note = 2'-O-methyladenosine
  modified_base 5: mod_base = gm
  modified_base 6: mod_base = gm
  modified_base 7: mod_base = OTHER; note = 2'-fluorouridine
  modified_base 8: mod_base = OTHER; note = 2'-fluoroadenosine
  modified_base 9: mod_base = OTHER; note = 2'-fluoroguanosine
  modified_base 10: mod_base = cm
  modified_base 11: mod_base = gm
  modified_base 12: mod_base = gm
  modified_base 13: mod_base = um
  modified_base 14: mod_base = OTHER; note = 2'-O-methyladenosine
  modified_base 15: mod_base = gm
  modified_base 16: mod_base = um
  modified_base 17: mod_base = gm
  modified_base 18: mod_base = OTHER; note = 2'-O-methyladenosine
  modified_base 19: mod_base = OTHER; note = 2'-O-methyladenosine
  modified_base 20: mod_base = OTHER; note = 2'-deoxythymidine
  modified_base 21: mod_base = OTHER; note = 2'-deoxythymidine
  source 1..21: mol_type = other RNA
gcgaggtagcggtagtgaatt

SEQ ID NO: 1323 - RNA, 21 nt, synthetic construct
  modified_base 1: mod_base = gm
  modified_base 2: mod_base = cm
  modified_base 3: mod_base = OTHER; note = 2'-O-methyladenosine
  modified_base 4: mod_base = cm
  modified_base 5: mod_base = um
  modified_base 6: mod_base = um
  modified_base 7: mod_base = OTHER; note = 2'-fluorocytidine
  modified_base 8: mod_base = OTHER; note = 2'-fluoroguanosine
  modified_base 9: mod_base = OTHER; note = 2'-fluorocytidine
  modified_base 10: mod_base = cm
  modified_base 11: mod_base = um
  modified_base 12: mod_base = um
  modified_base 13: mod_base = cm
  modified_base 14: mod_base = cm
  modified_base 15: mod_base = OTHER; note = 2'-O-methyladenosine
  modified_base 16: mod_base = gm
  modified_base 17: mod_base = gm
  modified_base 18: mod_base = OTHER; note = 2'-O-methyladenosine
  modified_base 19: mod_base = um
  modified_base 20: mod_base = OTHER; note = 2'-deoxythymidine
  modified_base 21: mod_base = OTHER; note = 2'-deoxythymidine
  source 1..21: mol_type = other RNA
gcacttcgccttccaggattt

SEQ ID NO: 1324 - RNA, 21 nt, synthetic construct
  modified_base 1: mod_base = cm
  modified_base 2: mod_base = OTHER; note = 2'-O-methyladenosine
  modified_base 3: mod_base = gm
  modified_base 4: mod_base = cm
  modified_base 5: mod_base = gm
  modified_base 6: mod_base = OTHER; note = 2'-O-methyladenosine
  modified_base 7: mod_base = gm
  modified_base 8: mod_base = gm
  modified_base 9: mod_base = OTHER; note = 2'-fluorouridine
  modified_base 10: mod_base = OTHER; note = 2'-fluoroadenosine
  modified_base 11: mod_base = OTHER; note = 2'-fluoroguanosine
  modified_base 12: mod_base = cm
  modified_base 13: mod_base = gm
  modified_base 14: mod_base = gm
  modified_base 15: mod_base = um
  modified_base 16: mod_base = OTHER; note = 2'-O-methyladenosine
  modified_base 17: mod_base = gm
  modified_base 18: mod_base = um
  modified_base 19: mod_base = gm
  modified_base 20: mod_base = OTHER; note = 2'-O-methyladenosine
  modified_base 21: mod_base = OTHER; note = 2'-O-methyladenosine
  source 1..21: mol_type = other RNA
cagcgaggtagcggtagtgaa

SEQ ID NO: 1325 - RNA, 21 nt, synthetic construct
  modified_base 1: mod_base = cm
  modified_base 2: mod_base = um
  modified_base 3: mod_base = gm
  modified_base 4: mod_base = cm
  modified_base 5: mod_base = OTHER; note = 2'-O-methyladenosine
  modified_base 6: mod_base = cm
  modified_base 7: mod_base = um
  modified_base 8: mod_base = um
  modified_base 9: mod_base = OTHER; note = 2'-fluorocytidine
  modified_base 10: mod_base = OTHER; note = 2'-fluoroguanosine
  modified_base 11: mod_base = OTHER; note = 2'-fluorocytidine
  modified_base 12: mod_base = cm
  modified_base 13: mod_base = um
  modified_base 14: mod_base = um
  modified_base 15: mod_base = cm
  modified_base 16: mod_base = cm
  modified_base 17: mod_base = OTHER; note = 2'-O-methyladenosine
  modified_base 18: mod_base = gm
  modified_base 19: mod_base = gm
  modified_base 20: mod_base = OTHER; note = 2'-O-methyladenosine
  modified_base 21: mod_base = um
  source 1..21: mol_type = other RNA
ctgcacttcgccttccaggat

SEQ ID NO: 1326 - RNA, 21 nt, synthetic construct
  modified_base 1: mod_base = OTHER; note = 2'-O-methyladenosine
  modified_base 2: mod_base = gm
  modified_base 3: mod_base = gm
  modified_base 4: mod_base = gm
  modified_base 5: mod_base = gm
  modified_base 6: mod_base = cm
  modified_base 7: mod_base = gm
  modified_base 8: mod_base = OTHER; note = 2'-O-methyladenosine
  modified_base 9: mod_base = OTHER; note = 2'-fluoroguanosine
  modified_base 10: mod_base = OTHER; note = 2'-fluoroguanosine
  modified_base 11: mod_base = OTHER; note = 2'-fluorouridine
  modified_base 12: mod_base = gm
  modified_base 13: mod_base = um
  modified_base 14: mod_base = cm
  modified_base 15: mod_base = gm
  modified_base 16: mod_base = um
  modified_base 17: mod_base = gm
  modified_base 18: mod_base = cm
  modified_base 19: mod_base = um
  modified_base 20: mod_base = um
  modified_base 21: mod_base = OTHER; note = 2'-O-methyladenosine
  source 1..21: mol_type = other RNA
aggggcgaggtgtcgtgctta

SEQ ID NO: 1327 - RNA, 21 nt, synthetic construct
  modified_base 1: mod_base = gm
  modified_base 2: mod_base = gm
  modified_base 3: mod_base = cm
  modified_base 4: mod_base = OTHER; note = 2'-O-methyladenosine
  modified_base 5: mod_base = gm
  modified_base 6: mod_base = OTHER; note = 2'-O-methyladenosine
  modified_base 7: mod_base = cm
  modified_base 8: mod_base = gm
  modified_base 9: mod_base = OTHER; note = 2'-fluorocytidine
  modified_base 10: mod_base = OTHER; note = 2'-fluorocytidine
  modified_base 11: mod_base = OTHER; note = 2'-fluorocytidine
  modified_base 12: mod_base = um
  modified_base 13: mod_base = um
  modified_base 14: mod_base = cm
  modified_base 15: mod_base = um
  modified_base 16: mod_base = OTHER; note = 2'-O-methyladenosine
  modified_base 17: mod_base = cm
  modified_base 18: mod_base = gm
  modified_base 19: mod_base = cm
  modified_base 20: mod_base = gm
  modified_base 21: mod_base = OTHER; note = 2'-O-methyladenosine
  source 1..21: mol_type = other RNA
ggcagacgcccttctacgcga

SEQ ID NO: 1328 - RNA, 21 nt, synthetic construct
  modified_base 1: mod_base = cm
  modified_base 2: mod_base = cm
  modified_base 3: mod_base = cm
  modified_base 4: mod_base = cm
  modified_base 5: mod_base = gm
  modified_base 6: mod_base = OTHER; note = 2'-O-methyladenosine
  modified_base 7: mod_base = cm
  modified_base 8: mod_base = OTHER; note = 2'-O-methyladenosine
  modified_base 9: mod_base = OTHER; note = 2'-fluorouridine
  modified_base 10: mod_base = OTHER; note = 2'-fluorouridine
  modified_base 11: mod_base = OTHER; note = 2'-fluorocytidine
  modified_base 12: mod_base = cm
  modified_base 13: mod_base = um
  modified_base 14: mod_base = cm
  modified_base 15: mod_base = gm
  modified_base 16: mod_base = gm
  modified_base 17: mod_base = um
  modified_base 18: mod_base = OTHER; note = 2'-O-methyladenosine
  modified_base 19: mod_base = um
  modified_base 20: mod_base = um
  modified_base 21: mod_base = OTHER; note = 2'-O-methyladenosine
  source 1..21: mol_type = other RNA
ccccgacattcctcggtatta

SEQ ID NO: 1329 - RNA, 21 nt, synthetic construct
  modified_base 1: mod_base = um
  modified_base 2: mod_base = um
  modified_base 3: mod_base = cm
  modified_base 4: mod_base = cm
  modified_base 5: mod_base = um
  modified_base 6: mod_base = cm
  modified_base 7: mod_base = gm
  modified_base 8: mod_base = gm
  modified_base 9: mod_base = OTHER; note = 2'-fluorouridine
  modified_base 10: mod_base = OTHER; note = 2'-fluoroadenosine
  modified_base 11: mod_base = OTHER; note = 2'-fluorouridine
  modified_base 12: mod_base = um
  modified_base 13: mod_base = um
  modified_base 14: mod_base = OTHER; note = 2'-O-methyladenosine
  modified_base 15: mod_base = um
  modified_base 16: mod_base = um
  modified_base 17: mod_base = gm
  modified_base 18: mod_base = um
  modified_base 19: mod_base = cm
  modified_base 20: mod_base = um
  modified_base 21: mod_base = OTHER; note = 2'-O-methyladenosine
  source 1..21: mol_type = other RNA
ttcctcggtatttattgtcta

SEQ ID NO: 1330 - RNA, 21 nt, synthetic construct
  modified_base 1: mod_base = OTHER; note = 2'-O-methyladenosine
  modified_base 2: mod_base = cm
  modified_base 3: mod_base = um
  modified_base 4: mod_base = cm
  modified_base 5: mod_base = gm
  modified_base 6: mod_base = gm
  modified_base 7: mod_base = gm
  modified_base 8: mod_base = OTHER; note = 2'-O-methyladenosine
  modified_base 9: mod_base = OTHER; note = 2'-fluoroadenosine
  modified_base 10: mod_base = OTHER; note = 2'-fluoroadenosine
  modified_base 11: mod_base = OTHER; note = 2'-fluorouridine
  modified_base 12: mod_base = um
  modified_base 13: mod_base = um
  modified_base 14: mod_base = gm
  modified_base 15: mod_base = cm
  modified_base 16: mod_base = um
  modified_base 17: mod_base = um
  modified_base 18: mod_base = um
  modified_base 19: mod_base = um
  modified_base 20: mod_base = gm
  modified_base 21: mod_base = OTHER; note = 2'-O-methyladenosine
  source 1..21: mol_type = other RNA
actcgggaaatttgcttttga

SEQ ID NO: 1331 - RNA, 21 nt, synthetic construct
  modified_base 1: mod_base = gm
  modified_base 2: mod_base = gm
  modified_base 3: mod_base = OTHER; note = 2'-O-methyladenosine
  modified_base 4: mod_base = OTHER; note = 2'-O-methyladenosine
  modified_base 5: mod_base = OTHER; note = 2'-O-methyladenosine
  modified_base 6: mod_base = um
  modified_base 7: mod_base = um
  modified_base 8: mod_base = um
  modified_base 9: mod_base = OTHER; note = 2'-fluoroguanosine
  modified_base 10: mod_base = OTHER; note = 2'-fluorocytidine
  modified_base 11: mod_base = OTHER; note = 2'-fluorouridine
  modified_base 12: mod_base = um
  modified_base 13: mod_base = um
  modified_base 14: mod_base = um
  modified_base 15: mod_base = gm
  modified_base 16: mod_base = um
  modified_base 17: mod_base = cm
  modified_base 18: mod_base = OTHER; note = 2'-O-methyladenosine
  modified_base 19: mod_base = OTHER; note = 2'-O-methyladenosine
  modified_base 20: mod_base = OTHER; note = 2'-O-methyladenosine
  modified_base 21: mod_base = OTHER; note = 2'-O-methyladenosine
  source 1..21: mol_type = other RNA
ggaaatttgcttttgtcaaaa

SEQ ID NO: 1332 - RNA, 21 nt, synthetic construct
  modified_base 1: mod_base = um
  modified_base 2: mod_base = cm
  modified_base 3: mod_base = gm
  modified_base 4: mod_base = gm
  modified_base 5: mod_base = cm
  modified_base 6: mod_base = gm
  modified_base 7: mod_base = gm
  modified_base 8: mod_base = um
  modified_base 9: mod_base = OTHER; note = 2'-fluorouridine
  modified_base 10: mod_base = OTHER; note = 2'-fluorouridine
  modified_base 11: mod_base = OTHER; note = 2'-fluoroguanosine
  modified_base 12: mod_base = gm
  modified_base 13: mod_base = OTHER; note = 2'-O-methyladenosine
  modified_base 14: mod_base = um
  modified_base 15: mod_base = OTHER; note = 2'-O-methyladenosine
  modified_base 16: mod_base = um
  modified_base 17: mod_base = um
  modified_base 18: mod_base = um
  modified_base 19: mod_base = OTHER; note = 2'-O-methyl-2-aminoadenosine
  modified_base 20: mod_base = um
  modified_base 21: mod_base = um
  source 1..21: mol_type = other RNA
tcggcggtttggatatttntt

SEQ ID NO: 1333 - RNA, 21 nt, synthetic construct
  modified_base 1: mod_base = cm
  modified_base 2: mod_base = gm
  modified_base 3: mod_base = gm
  modified_base 4: mod_base = cm
  modified_base 5: mod_base = gm
  modified_base 6: mod_base = gm
  modified_base 7: mod_base = um
  modified_base 8: mod_base = um
  modified_base 9: mod_base = OTHER; note = 2'-fluorouridine
  modified_base 10: mod_base = OTHER; note = 2'-fluoroguanosine
  modified_base 11: mod_base = OTHER; note = 2'-fluoroguanosine
  modified_base 12: mod_base = OTHER; note = 2'-O-methyladenosine
  modified_base 13: mod_base = um
  modified_base 14: mod_base = OTHER; note = 2'-O-methyladenosine
  modified_base 15: mod_base = um
  modified_base 16: mod_base = um
  modified_base 17: mod_base = um
  modified_base 18: mod_base = OTHER; note = 2'-O-methyl-2-aminoadenosine
  modified_base 19: mod_base = um
  modified_base 20: mod_base = um
  modified_base 21: mod_base = OTHER; note = 2'-O-methyladenosine
  source 1..21: mol_type = other RNA
cggcggtttggatatttntta

SEQ ID NO: 1334 - RNA, 21 nt, synthetic construct
  modified_base 1: mod_base = OTHER; note = 2'-O-methyladenosine
  modified_base 2: mod_base = OTHER; note = 2'-O-methyladenosine
  modified_base 3: mod_base = cm
  modified_base 4: mod_base = cm
  modified_base 5: mod_base = cm
  modified_base 6: mod_base = cm
  modified_base 7: mod_base = OTHER; note = 2'-O-methyladenosine
  modified_base 8: mod_base = OTHER; note = 2'-O-methyladenosine
  modified_base 9: mod_base = OTHER; note = 2'-fluorouridine
  modified_base 10: mod_base = OTHER; note = 2'-fluorocytidine
  modified_base 11: mod_base = OTHER; note = 2'-fluorocytidine
  modified_base 12: mod_base = OTHER; note = 2'-O-methyladenosine
  modified_base 13: mod_base = cm
  modified_base 14: mod_base = gm
  modified_base 15: mod_base = um
  modified_base 16: mod_base = um
  modified_base 17: mod_base = um
  modified_base 18: mod_base = um
  modified_base 19: mod_base = gm
  modified_base 20: mod_base = gm
  modified_base 21: mod_base = OTHER; note = 2'-O-methyladenosine
  source 1..21: mol_type = other RNA
aaccccaatccacgttttgga

SEQ ID NO: 1335 - RNA, 21 nt, synthetic construct
  modified_base 1: mod_base = gm
  modified_base 2: mod_base = OTHER; note = 2'-O-methyladenosine
  modified_base 3: mod_base = um
  modified_base 4: mod_base = cm
  modified_base 5: mod_base = cm
  modified_base 6: mod_base = OTHER; note = 2'-O-methyladenosine
  modified_base 7: mod_base = cm
  modified_base 8: mod_base = gm
  modified_base 9: mod_base = OTHER; note = 2'-fluorouridine
  modified_base 10: mod_base = OTHER; note = 2'-fluorouridine
  modified_base 11: mod_base = OTHER; note = 2'-fluorouridine
  modified_base 12: mod_base = um
  modified_base 13: mod_base = gm
  modified_base 14: mod_base = gm
  modified_base 15: mod_base = OTHER; note = 2'-O-methyladenosine
  modified_base 16: mod_base = um
  modified_base 17: mod_base = OTHER; note = 2'-O-methylinosine
  modified_base 18: mod_base = cm
  modified_base 19: mod_base = OTHER; note = 2'-O-methyladenosine
  modified_base 20: mod_base = cm
  modified_base 21: mod_base = um
  source 1..21: mol_type = other RNA
gatccacgttttggatncact

SEQ ID NO: 1336 - RNA, 21 nt, synthetic construct
  modified_base 1: mod_base = OTHER; note = 2'-O-methyladenosine
  modified_base 2: mod_base = cm
  modified_base 3: mod_base = gm
  modified_base 4: mod_base = um
  modified_base 5: mod_base = um
  modified_base 6: mod_base = um
  modified_base 7: mod_base = um
  modified_base 8: mod_base = gm
  modified_base 9: mod_base = OTHER; note = 2'-fluoroguanosine
  modified_base 10: mod_base = OTHER; note = 2'-fluoroadenosine
  modified_base 11: mod_base = OTHER; note = 2'-fluorouridine
  modified_base 12: mod_base = gm
  modified_base 13: mod_base = cm
  modified_base 14: mod_base = OTHER; note = 2'-O-methyladenosine
  modified_base 15: mod_base = cm
  modified_base 16: mod_base = um
  modified_base 17: mod_base = OTHER; note = 2'-O-methylinosine
  modified_base 18: mod_base = OTHER; note = 2'-O-methyladenosine
  modified_base 19: mod_base = gm
  modified_base 20: mod_base = OTHER; note = 2'-O-methyladenosine
  modified_base 21: mod_base = OTHER; note = 2'-O-methyladenosine
  source 1..21: mol_type = other RNA
acgttttggatgcactnagaa

SEQ ID NO: 1337 - RNA, 21 nt, synthetic construct
  modified_base 1: mod_base = cm
  modified_base 2: mod_base = gm
  modified_base 3: mod_base = um
  modified_base 4: mod_base = um
  modified_base 5: mod_base = um
  modified_base 6: mod_base = um
  modified_base 7: mod_base = gm
  modified_base 8: mod_base = gm
  modified_base 9: mod_base = OTHER; note = 2'-fluoroadenosine
  modified_base 10: mod_base = OTHER; note = 2'-fluorouridine
  modified_base 11: mod_base = OTHER; note = 2'-fluoroguanosine
  modified_base 12: mod_base = cm
  modified_base 13: mod_base = OTHER; note = 2'-O-methyladenosine
  modified_base 14: mod_base = cm
  modified_base 15: mod_base = um
  modified_base 16: mod_base = OTHER; note = 2'-O-methylinosine
  modified_base 17: mod_base = OTHER; note = 2'-O-methyladenosine
  modified_base 18: mod_base = gm
  modified_base 19: mod_base = OTHER; note = 2'-O-methyladenosine
  modified_base 20: mod_base = cm
  modified_base 21: mod_base = OTHER; note = 2'-O-methyladenosine
  source 1..21: mol_type = other RNA
cgttttggatgcactnagaca

SEQ ID NO: 1338 - RNA, 21 nt, synthetic construct
  modified_base 1: mod_base = OTHER; note = 2'-O-methyladenosine
  modified_base 2: mod_base = um
  modified_base 3: mod_base = um
  modified_base 4: mod_base = cm
  modified_base 5: mod_base = cm
  modified_base 6: mod_base = um
  modified_base 7: mod_base = cm
  modified_base 8: mod_base = gm
  modified_base 9: mod_base = OTHER; note = 2'-fluoroguanosine
  modified_base 10: mod_base = OTHER; note = 2'-fluorouridine
  modified_base 11: mod_base = OTHER; note = 2'-fluoroadenosine
  modified_base 12: mod_base = um
  modified_base 13: mod_base = um
  modified_base 14: mod_base = um
  modified_base 15: mod_base = OTHER; note = 2'-O-methyladenosine
  modified_base 16: mod_base = um
  modified_base 17: mod_base = um
  modified_base 18: mod_base = gm
  modified_base 19: mod_base = um
  modified_base 20: mod_base = cm
  modified_base 21: mod_base = um
  source 1..21: mol_type = other RNA
attcctcggtatttattgtct

SEQ ID NO: 1339 - RNA, 21 nt, synthetic construct
  modified_base 1: mod_base = cm
  modified_base 2: mod_base = cm
  modified_base 3: mod_base = um
  modified_base 4: mod_base = cm
  modified_base 5: mod_base = gm
  modified_base 6: mod_base = gm
  modified_base 7: mod_base = um
  modified_base 8: mod_base = OTHER; note = 2'-O-methyladenosine
  modified_base 9: mod_base = OTHER; note = 2'-fluorouridine
  modified_base 10: mod_base = OTHER; note = 2'-fluorouridine
  modified_base 11: mod_base = OTHER; note = 2'-fluorouridine
  modified_base 12: mod_base = OTHER; note = 2'-O-methyladenosine
  modified_base 13: mod_base = um
  modified_base 14: mod_base = um
  modified_base 15: mod_base = gm
  modified_base 16: mod_base = um
  modified_base 17: mod_base = um
  modified_base 18: mod_base = um
  modified_base 19: mod_base = gm
  modified_base 20: mod_base = um
  modified_base 21: mod_base = OTHER; note = 2'-O-methyladenosine
  source 1..21: mol_type = other RNA
cctcggtatttattgtttgta

SEQ ID NO: 1340 - RNA, 21 nt, synthetic construct
  modified_base 1: mod_base = cm
  modified_base 2: mod_base = um
  modified_base 3: mod_base = cm
  modified_base 4: mod_base = gm
  modified_base 5: mod_base = gm
  modified_base 6: mod_base = um
  modified_base 7: mod_base = OTHER; note = 2'-O-methyladenosine
  modified_base 8: mod_base = um
  modified_base 9: mod_base = OTHER; note = 2'-fluorouridine
  modified_base 10: mod_base = OTHER; note = 2'-fluorouridine
  modified_base 11: mod_base = OTHER; note = 2'-fluoroadenosine
  modified_base 12: mod_base = um
  modified_base 13: mod_base = um
  modified_base 14: mod_base = gm
  modified_base 15: mod_base = um
  modified_base 16: mod_base = cm
  modified_base 17: mod_base = um
  modified_base 18: mod_base = OTHER; note = 2'-O-methylinosine
  modified_base 19: mod_base = um
  modified_base 20: mod_base = cm
  modified_base 21: mod_base = OTHER; note = 2'-O-methyladenosine
  source 1..21: mol_type = other RNA
ctcggtatttattgtctntca

SEQ ID NO: 1341 - RNA, 21 nt, synthetic construct
  modified_base 1: mod_base = gm
  modified_base 2: mod_base = OTHER; note = 2'-O-methyladenosine
  modified_base 3: mod_base = um
  modified_base 4: mod_base = um
  modified_base 5: mod_base = gm
  modified_base 6: mod_base = um
  modified_base 7: mod_base = cm
  modified_base 8: mod_base = um
  modified_base 9: mod_base = OTHER; note = 2'-fluoroguanosine
  modified_base 10: mod_base = OTHER; note = 2'-fluorouridine
  modified_base 11: mod_base = OTHER; note = 2'-fluorocytidine
  modified_base 12: mod_base = cm
  modified_base 13: mod_base = cm
  modified_base 14: mod_base = cm
  modified_base 15: mod_base = OTHER; note = 2'-O-methyladenosine
  modified_base 16: mod_base = um
  modified_base 17: mod_base = cm
  modified_base 18: mod_base = um
  modified_base 19: mod_base = OTHER; note = 2'-O-methyladenosine
  modified_base 20: mod_base = gm
  modified_base 21: mod_base = OTHER; note = 2'-O-methyladenosine
  source 1..21: mol_type = other RNA
gattgtctgtccccatctaga

SEQ ID NO: 1342 - RNA, 21 nt, synthetic construct
  modified_base 1: mod_base = gm
  modified_base 2: mod_base = cm
  modified_base 3: mod_base = OTHER; note = 2'-O-methyladenosine
  modified_base 4: mod_base = um
  modified_base 5: mod_base = um
  modified_base 6: mod_base = cm
  modified_base 7: mod_base = cm
  modified_base 8: mod_base = um
  modified_base 9: mod_base = OTHER; note = 2'-fluorocytidine
  modified_base 10: mod_base = OTHER; note = 2'-fluoroguanosine
  modified_base 11: mod_base = OTHER; note = 2'-fluoroguanosine
  modified_base 12: mod_base = um
  modified_base 13: mod_base = OTHER; note = 2'-O-methyladenosine
  modified_base 14: mod_base = um
  modified_base 15: mod_base = um
  modified_base 16: mod_base = um
  modified_base 17: mod_base = OTHER; note = 2'-O-methyladenosine
  modified_base 18: mod_base = um
  modified_base 19: mod_base = um
  modified_base 20: mod_base = gm
  modified_base 21: mod_base = um
  source 1..21: mol_type = other RNA
gcattcctcggtatttattgt

SEQ ID NO: 1343 - RNA, 21 nt, synthetic construct
  modified_base 1: mod_base = cm
  modified_base 2: mod_base = cm
  modified_base 3: mod_base = um
  modified_base 4: mod_base = gm
  modified_base 5: mod_base = gm
  modified_base 6: mod_base = um
  modified_base 7: mod_base = cm
  modified_base 8: mod_base = OTHER; note = 2'-O-methyladenosine
  modified_base 9: mod_base = OTHER; note = 2'-fluorouridine
  modified_base 10: mod_base = OTHER; note = 2'-fluoroguanosine
  modified_base 11: mod_base = OTHER; note = 2'-fluoroguanosine
  modified_base 12: mod_base = OTHER; note = 2'-O-methyladenosine
  modified_base 13: mod_base = gm
  modified_base 14: mod_base = um
  modified_base 15: mod_base = OTHER; note = 2'-O-methyladenosine
  modified_base 16: mod_base = um
  modified_base 17: mod_base = um
  modified_base 18: mod_base = OTHER; note = 2'-O-methyladenosine
  modified_base 19: mod_base = cm
  modified_base 20: mod_base = gm
  modified_base 21: mod_base = um
  source 1..21: mol_type = other RNA
cctggtcatggagtattacgt

SEQ ID NO: 1344 - RNA, 21 nt, synthetic construct
  modified_base 1: mod_base = gm
  modified_base 2: mod_base = um
  modified_base 3: mod_base = cm
  modified_base 4: mod_base = cm
  modified_base 5: mod_base = um
  modified_base 6: mod_base = cm
  modified_base 7: mod_base = gm
  modified_base 8: mod_base = gm
  modified_base 9: mod_base = OTHER; note = 2'-fluorouridine
  modified_base 10: mod_base = OTHER; note = 2'-fluoroadenosine
  modified_base 11: mod_base = OTHER; note = 2'-fluorouridine
  modified_base 12: mod_base = um
  modified_base 13: mod_base = um
  modified_base 14: mod_base = OTHER; note = 2'-O-methyladenosine
  modified_base 15: mod_base = um
  modified_base 16: mod_base = um
  modified_base 17: mod_base = gm
  modified_base 18: mod_base = um
  modified_base 19: mod_base = cm
  modified_base 20: mod_base = um
  modified_base 21: mod_base = OTHER; note = 2'-O-methyladenosine
  source 1..21: mol_type = other RNA
gtcctcggtatttattgtcta

SEQ ID NO: 1345 - RNA, 21 nt, synthetic construct
  modified_base 1: mod_base = um
  modified_base 2: mod_base = um
  modified_base 3: mod_base = cm
  modified_base 4: mod_base = cm
  modified_base 5: mod_base = um
  modified_base 6: mod_base = cm
  modified_base 7: mod_base = gm
  modified_base 8: mod_base = gm
  modified_base 9: mod_base = OTHER; note = 2'-fluorouridine
  modified_base 10: mod_base = OTHER; note = 2'-O-methyladenosine
  modified_base 11: mod_base = OTHER; note = 2'-fluorouridine
  modified_base 12: mod_base = um
  modified_base 13: mod_base = OTHER; note = 2'-fluorouridine
  modified_base 14: mod_base = OTHER; note = 2'-O-methyladenosine
  modified_base 15: mod_base = um
  modified_base 16: mod_base = um
  modified_base 17: mod_base = gm
  modified_base 18: mod_base = um
  modified_base 19: mod_base = cm
  modified_base 20: mod_base = um
  modified_base 21: mod_base = OTHER; note = 2'-O-methyladenosine
  source 1..21: mol_type = other RNA
ttcctcggtatttattgtcta

SEQ ID NO: 1346 - RNA, 21 nt, synthetic construct
  modified_base 1: mod_base = cm
  modified_base 2: mod_base = cm
  modified_base 3: mod_base = um
  modified_base 4: mod_base = gm
  modified_base 5: mod_base = gm
  modified_base 6: mod_base = um
  modified_base 7: mod_base = cm
  modified_base 8: mod_base = OTHER; note = 2'-O-methyladenosine
  modified_base 9: mod_base = OTHER; note = 2'-fluorouridine
  modified_base 10: mod_base = gm
  modified_base 11: mod_base = OTHER; note = 2'-fluoroguanosine
  modified_base 12: mod_base = OTHER; note = 2'-O-methyladenosine
  modified_base 13: mod_base = OTHER; note = 2'-fluoroguanosine
  modified_base 14: mod_base = um
  modified_base 15: mod_base = OTHER; note = 2'-O-methyladenosine
  modified_base 16: mod_base = um
  modified_base 17: mod_base = um
  modified_base 18: mod_base = OTHER; note = 2'-O-methyladenosine
  modified_base 19: mod_base = cm
  modified_base 20: mod_base = gm
  modified_base 21: mod_base = um
  source 1..21: mol_type = other RNA
cctggtcatggagtattacgt

SEQ ID NO: 1347 - RNA, 21 nt, synthetic construct
  modified_base 1: mod_base = cm
  modified_base 2: mod_base = cm
  modified_base 3: mod_base = um
  modified_base 4: mod_base = gm
  modified_base 5: mod_base = gm
  modified_base 6: mod_base = um
  modified_base 7: mod_base = cm
  modified_base 8: mod_base = OTHER; note = 2'-O-methyladenosine
  modified_base 9: mod_base = OTHER; note = 2'-fluorouridine
  modified_base 10: mod_base = gm
  modified_base 11: mod_base = OTHER; note = 2'-fluoroguanosine
  modified_base 12: mod_base = OTHER; note = 2'-O-methyladenosine
  modified_base 13: mod_base = gm
  modified_base 14: mod_base = um
  modified_base 15: mod_base = OTHER; note = 2'-O-methyladenosine
  modified_base 16: mod_base = um
  modified_base 17: mod_base = um
  modified_base 18: mod_base = OTHER; note = 2'-O-methyladenosine
  modified_base 19: mod_base = cm
  modified_base 20: mod_base = gm
  modified_base 21: mod_base = um
  source 1..21: mol_type = other RNA
cctggtcatggagtattacgt

SEQ ID NO: 1348 - RNA, 21 nt, synthetic construct
  modified_base 1: mod_base = cm
  modified_base 2: mod_base = cm
  modified_base 3: mod_base = cm
  modified_base 4: mod_base = cm
  modified_base 5: mod_base = gm
  modified_base 6: mod_base = OTHER; note = 2'-O-methyladenosine
  modified_base 7: mod_base = cm
  modified_base 8: mod_base = OTHER; note = 2'-O-methyladenosine
  modified_base 9: mod_base = OTHER; note = 2'-fluorouridine
  modified_base 10: mod_base = OTHER; note = 2'-fluorouridine
  modified_base 11: mod_base = OTHER; note = 2'-fluorocytidine
  modified_base 12: mod_base = cm
  modified_base 13: mod_base = um
  modified_base 14: mod_base = cm
  modified_base 15: mod_base = gm
  modified_base 16: mod_base = gm
  modified_base 17: mod_base = um
  modified_base 18: mod_base = OTHER; note = 2'-O-methyladenosine
  modified_base 19: mod_base = um
  modified_base 20: mod_base = um
  modified_base 21: mod_base = OTHER; note = 2'-O-methyladenosine
  source 1..21: mol_type = other RNA
ccccgacattcctcggtatta

SEQ ID NO: 1349 - RNA, 21 nt, synthetic construct
  modified_base 1: mod_base = um
  modified_base 2: mod_base = um
  modified_base 3: mod_base = cm
  modified_base 4: mod_base = cm
  modified_base 5: mod_base = um
  modified_base 6: mod_base = cm
  modified_base 7: mod_base = gm
  modified_base 8: mod_base = gm
  modified_base 9: mod_base = OTHER; note = 2'-fluorouridine
  modified_base 10: mod_base = OTHER; note = 2'-fluoroadenosine
  modified_base 11: mod_base = OTHER; note = 2'-fluorouridine
  modified_base 12: mod_base = um
  modified_base 13: mod_base = um
  modified_base 14: mod_base = OTHER; note = 2'-O-methyladenosine
  modified_base 15: mod_base = um
  modified_base 16: mod_base = um
  modified_base 17: mod_base = gm
  modified_base 18: mod_base = um
  modified_base 19: mod_base = cm
  modified_base 20: mod_base = um
  modified_base 21: mod_base = OTHER; note = 2'-O-methyladenosine
  source 1..21: mol_type = other RNA
ttcctcggtatttattgtcta

SEQ ID NO: 1350 - RNA, 21 nt, synthetic construct
  modified_base 1: mod_base = um
  modified_base 2: mod_base = gm
  modified_base 3: mod_base = gm
  modified_base 4: mod_base = cm
  modified_base 5: mod_base = OTHER; note = 2'-O-methyladenosine
  modified_base 6: mod_base = OTHER; note = 2'-O-methyladenosine
  modified_base 7: mod_base = gm
  modified_base 8: mod_base = OTHER; note = 2'-O-methyladenosine
  modified_base 9: mod_base = OTHER; note = 2'-fluorouridine
  modified_base 10: mod_base = cm
  modified_base 11: mod_base = OTHER; note = 2'-fluoroguanosine
  modified_base 12: mod_base = um
  modified_base 13: mod_base = cm
  modified_base 14: mod_base = cm
  modified_base 15: mod_base = OTHER; note = 2'-O-methyladenosine
  modified_base 16: mod_base = cm
  modified_base 17: mod_base = um
  modified_base 18: mod_base = OTHER; note = 2'-O-methyladenosine
  modified_base 19: mod_base = cm
  modified_base 20: mod_base = OTHER; note = 2'-O-methyladenosine
  modified_base 21: mod_base = OTHER; note = 2'-O-methyladenosine
  source 1..21: mol_type = other RNA
tggcaagatcgtccactacaa

SEQ ID NO: 1351 - RNA, 21 nt, synthetic construct
  modified_base 1: mod_base = um
  modified_base 2: mod_base = gm
  modified_base 3: mod_base = gm
  modified_base 4: mod_base = cm
  modified_base 5: mod_base = OTHER; note = 2'-O-methyladenosine
  modified_base 6: mod_base = OTHER; note = 2'-O-methyladenosine
  modified_base 7: mod_base = OTHER; note = 2'-fluoroguanosine
  modified_base 8: mod_base = OTHER; note = 2'-O-methyladenosine
  modified_base 9: mod_base = OTHER; note = 2'-fluorouridine
  modified_base 10: mod_base = cm
  modified_base 11: mod_base = OTHER; note = 2'-fluoroguanosine
  modified_base 12: mod_base = um
  modified_base 13: mod_base = cm
  modified_base 14: mod_base = cm
  modified_base 15: mod_base = OTHER; note = 2'-O-methyladenosine
  modified_base 16: mod_base = cm
  modified_base 17: mod_base = um
  modified_base 18: mod_base = OTHER; note = 2'-O-methyladenosine
  modified_base 19: mod_base = cm
  modified_base 20: mod_base = OTHER; note = 2'-O-methyladenosine
  modified_base 21: mod_base = OTHER; note = 2'-O-methyladenosine
  source 1..21: mol_type = other RNA
tggcaagatcgtccactacaa

SEQ ID NO: 1352 - RNA, 21 nt, synthetic construct
  modified_base 1: mod_base = gm
  modified_base 2: mod_base = um
  modified_base 3: mod_base = cm
  modified_base 4: mod_base = cm
  modified_base 5: mod_base = um
  modified_base 6: mod_base = cm
  modified_base 7: mod_base = gm
  modified_base 8: mod_base = gm
  modified_base 9: mod_base = OTHER; note = 2'-fluorouridine
  modified_base 10: mod_base = OTHER; note = 2'-O-methyladenosine
  modified_base 11: mod_base = OTHER; note = 2'-fluorouridine
  modified_base 12: mod_base = um
  modified_base 13: mod_base = OTHER; note = 2'-fluorouridine
  modified_base 14: mod_base = OTHER; note = 2'-O-methyladenosine
  modified_base 15: mod_base = um
  modified_base 16: mod_base = um
  modified_base 17: mod_base = gm
  modified_base 18: mod_base = um
  modified_base 19: mod_base = cm
  modified_base 20: mod_base = um
  modified_base 21: mod_base = OTHER; note = 2'-O-methyladenosine
  source 1..21: mol_type = other RNA
gtcctcggtatttattgtcta

SEQ ID NO: 1353 - RNA, 21 nt, synthetic construct
  modified_base 1: mod_base = um
  modified_base 2: mod_base = um
  modified_base 3: mod_base = cm
  modified_base 4: mod_base = cm
  modified_base 5: mod_base = um
  modified_base 6: mod_base = cm
  modified_base 7: mod_base = gm
  modified_base 8: mod_base = gm
  modified_base 9: mod_base = OTHER; note = 2'-fluorouridine
  modified_base 10: mod_base = OTHER; note = 2'-O-methyladenosine
  modified_base 11: mod_base = OTHER; note = 2'-fluorouridine
  modified_base 12: mod_base = OTHER; note = 2'-fluorouridine
  modified_base 13: mod_base = um
  modified_base 14: mod_base = OTHER; note = 2'-O-methyladenosine
  modified_base 15: mod_base = um
  modified_base 16: mod_base = um
  modified_base 17: mod_base = gm
  modified_base 18: mod_base = um
  modified_base 19: mod_base = cm
  modified_base 20: mod_base = um
  modified_base 21: mod_base = OTHER; note = 2'-O-methyladenosine
  source 1..21: mol_type = other RNA
ttcctcggtatttattgtcta

SEQ ID NO: 1354 - RNA, 21 nt, synthetic construct
  modified_base 1: mod_base = OTHER; note = 2'-O-methyladenosine
  modified_base 2: mod_base = cm
  modified_base 3: mod_base = OTHER; note = 2'-O-methyladenosine
  modified_base 4: mod_base = OTHER; note = 2'-O-methyladenosine
  modified_base 5: mod_base = gm
  modified_base 6: mod_base = um
  modified_base 7: mod_base = gm
  modified_base 8: mod_base = gm
  modified_base 9: mod_base = OTHER; note = 2'-fluoroguanosine
  modified_base 10: mod_base = OTHER; note = 2'-fluoroadenosine
  modified_base 11: mod_base = OTHER; note = 2'-fluorocytidine
  modified_base 12: mod_base = OTHER; note = 2'-O-methyladenosine
  modified_base 13: mod_base = um
  modified_base 14: mod_base = gm
  modified_base 15: mod_base = cm
  modified_base 16: mod_base = um
  modified_base 17: mod_base = OTHER; note = 2'-O-methylinosine
  modified_base 18: mod_base = OTHER; note = 2'-O-methyladenosine
  modified_base 19: mod_base = OTHER; note = 2'-O-methyladenosine
  modified_base 20: mod_base = gm
  modified_base 21: mod_base = OTHER; note = 2'-O-methyladenosine
  source 1..21: mol_type = other RNA
acaagtgggacatgctnaaga

SEQ ID NO: 1355 - RNA, 21 nt, synthetic construct
  modified_base 1: mod_base = cm
  modified_base 2: mod_base = OTHER; note = 2'-O-methyladenosine
  modified_base 3: mod_base = OTHER; note = 2'-O-methyladenosine
  modified_base 4: mod_base = gm
  modified_base 5: mod_base = um
  modified_base 6: mod_base = gm
  modified_base 7: mod_base = gm
  modified_base 8: mod_base = gm
  modified_base 9: mod_base = OTHER; note = 2'-fluoroadenosine
  modified_base 10: mod_base = OTHER; note = 2'-fluorocytidine
  modified_base 11: mod_base = OTHER; note = 2'-fluoroadenosine
  modified_base 12: mod_base = um
  modified_base 13: mod_base = gm
  modified_base 14: mod_base = cm
  modified_base 15: mod_base = um
  modified_base 16: mod_base = OTHER; note = 2'-O-methylinosine
  modified_base 17: mod_base = OTHER; note = 2'-O-methyladenosine
  modified_base 18: mod_base = OTHER; note = 2'-O-methyladenosine
  modified_base 19: mod_base = gm
  modified_base 20: mod_base = OTHER; note = 2'-O-methyladenosine
  modified_base 21: mod_base = OTHER; note = 2'-O-methyladenosine
  source 1..21: mol_type = other RNA
caagtgggacatgctnaagaa

SEQ ID NO: 1356 - RNA, 21 nt, synthetic construct
  modified_base 1: mod_base = cm
  modified_base 2: mod_base = um
  modified_base 3: mod_base = um
  modified_base 4: mod_base = cm
  modified_base 5: mod_base = cm
  modified_base 6: mod_base = OTHER; note = 2'-O-methyladenosine
  modified_base 7: mod_base = gm
  modified_base 8: mod_base = gm
  modified_base 9: mod_base = OTHER; note = 2'-fluoroadenosine
  modified_base 10: mod_base = OTHER; note = 2'-fluorouridine
  modified_base 11: mod_base = OTHER; note = 2'-fluoroguanosine
  modified_base 12: mod_base = OTHER; note = 2'-O-methyladenosine
  modified_base 13: mod_base = gm
  modified_base 14: mod_base = OTHER; note = 2'-O-methyladenosine
  modified_base 15: mod_base = OTHER; note = 2'-O-methyladenosine
  modified_base 16: mod_base = cm
  modified_base 17: mod_base = um
  modified_base 18: mod_base = OTHER; note = 2'-O-methyladenosine
  modified_base 19: mod_base = cm
  modified_base 20: mod_base = um
  modified_base 21: mod_base = um
  source 1..21: mol_type = other RNA
cttccaggatgagaactactt

SEQ ID NO: 1357 - RNA, 21 nt, synthetic construct
  modified_base 1: mod_base = cm
  modified_base 2: mod_base = um
  modified_base 3: mod_base = um
  modified_base 4: mod_base = cm
  modified_base 5: mod_base = cm
  modified_base 6: mod_base = OTHER; note = 2'-O-methyladenosine
  modified_base 7: mod_base = gm
  modified_base 8: mod_base = gm
  modified_base 9: mod_base = OTHER; note = 2'-fluoroadenosine
  modified_base 10: mod_base = OTHER; note = 2'-fluorouridine
  modified_base 11: mod_base = OTHER; note = 2'-fluoroguanosine
  modified_base 12: mod_base = OTHER; note = 2'-O-methyladenosine
  modified_base 13: mod_base = gm
  modified_base 14: mod_base = OTHER; note = 2'-O-methyladenosine
  modified_base 15: mod_base = OTHER; note = 2'-O-methyladenosine
  modified_base 16: mod_base = cm
  modified_base 17: mod_base = um
  modified_base 18: mod_base = OTHER; note = 2'-O-methyladenosine
  modified_base 19: mod_base = um
  modified_base 20: mod_base = cm
  modified_base 21: mod_base = um
  source 1..21: mol_type = other RNA
cttccaggatgagaactatct

SEQ ID NO: 1358 - RNA, 21 nt, synthetic construct
  modified_base 1: mod_base = um
  modified_base 2: mod_base = cm
  modified_base 3: mod_base = cm
  modified_base 4: mod_base = OTHER; note = 2'-O-methyladenosine
  modified_base 5: mod_base = gm
  modified_base 6: mod_base = gm
  modified_base 7: mod_base = OTHER; note = 2'-O-methyladenosine
  modified_base 8: mod_base = um
  modified_base 9: mod_base = OTHER; note = 2'-fluoroguanosine
  modified_base 10: mod_base = OTHER; note = 2'-fluoroadenosine
  modified_base 11: mod_base = OTHER; note = 2'-fluoroguanosine
  modified_base 12: mod_base = OTHER; note = 2'-O-methyladenosine
  modified_base 13: mod_base = OTHER; note = 2'-O-methyladenosine
  modified_base 14: mod_base = cm
  modified_base 15: mod_base = um
  modified_base 16: mod_base = OTHER; note = 2'-O-methyladenosine
  modified_base 17: mod_base = cm
  modified_base 18: mod_base = cm
  modified_base 19: mod_base = um
  modified_base 20: mod_base = OTHER; note = 2'-O-methylinosine
  modified_base 21: mod_base = um
  source 1..21: mol_type = other RNA
tccaggatgagaactacctnt

SEQ ID NO: 1359 - RNA, 21 nt, synthetic construct
  modified_base 1: mod_base = um
  modified_base 2: mod_base = cm
  modified_base 3: mod_base = cm
  modified_base 4: mod_base = OTHER; note = 2'-O-methyladenosine
  modified_base 5: mod_base = gm
  modified_base 6: mod_base = gm
  modified_base 7: mod_base = OTHER; note = 2'-O-methyladenosine
  modified_base 8: mod_base = um
  modified_base 9: mod_base = OTHER; note = 2'-fluoroguanosine
  modified_base 10: mod_base = OTHER; note = 2'-fluoroadenosine
  modified_base 11: mod_base = OTHER; note = 2'-fluoroguanosine
  modified_base 12: mod_base = OTHER; note = 2'-O-methyladenosine
  modified_base 13: mod_base = OTHER; note = 2'-O-methyladenosine
  modified_base 14: mod_base = cm
  modified_base 15: mod_base = um
  modified_base 16: mod_base = OTHER; note = 2'-O-methyladenosine
  modified_base 17: mod_base = cm
  modified_base 18: mod_base = um
  modified_base 19: mod_base = um
  modified_base 20: mod_base = gm
  modified_base 21: mod_base = um
  source 1..21: mol_type = other RNA
tccaggatgagaactacttgt

SEQ ID NO: 1360 - RNA, 21 nt, synthetic construct
  modified_base 1: mod_base = OTHER; note = 2'-O-methyladenosine
  modified_base 2: mod_base = gm
  modified_base 3: mod_base = gm
  modified_base 4: mod_base = OTHER; note = 2'-O-methyladenosine
  modified_base 5: mod_base = um
  modified_base 6: mod_base = gm
  modified_base 7: mod_base = OTHER; note = 2'-O-methyladenosine
  modified_base 8: mod_base = gm
  modified_base 9: mod_base = OTHER; note = 2'-fluoroadenosine
  modified_base 10: mod_base = OTHER; note = 2'-fluoroadenosine
  modified_base 11: mod_base = OTHER; note = 2'-fluorocytidine
  modified_base 12: mod_base = um
  modified_base 13: mod_base = OTHER; note = 2'-O-methyladenosine
  modified_base 14: mod_base = cm
  modified_base 15: mod_base = cm
  modified_base 16: mod_base = um
  modified_base 17: mod_base = OTHER; note = 2'-O-methylinosine
  modified_base 18: mod_base = um
  modified_base 19: mod_base = OTHER; note = 2'-O-methyladenosine
  modified_base 20: mod_base = cm
  modified_base 21: mod_base = OTHER; note = 2'-O-methyladenosine
  source 1..21: mol_type = other RNA
aggatgagaactacctntaca

SEQ ID NO: 1361 - RNA, 21 nt, synthetic construct
  modified_base 1: mod_base = cm
  modified_base 2: mod_base = um
  modified_base 3: mod_base = OTHER; note = 2'-O-methyladenosine
  modified_base 4: mod_base = cm
  modified_base 5: mod_base = cm
  modified_base 6: mod_base = um
  modified_base 7: mod_base = gm
  modified_base 8: mod_base = um
  modified_base 9: mod_base = OTHER; note = 2'-fluoroadenosine
  modified_base 10: mod_base = OTHER; note = 2'-fluorocytidine
  modified_base 11: mod_base = OTHER; note = 2'-fluorocytidine
  modified_base 12: mod_base = um
  modified_base 13: mod_base = gm
  modified_base 14: mod_base = gm
  modified_base 15: mod_base = um
  modified_base 16: mod_base = cm
  modified_base 17: mod_base = OTHER; note = 2'-O-methyladenosine
  modified_base 18: mod_base = um
  modified_base 19: mod_base = OTHER; note = 2'-O-methylinosine
  modified_base 20: mod_base = gm
  modified_base 21: mod_base = OTHER; note = 2'-O-methyladenosine
  source 1..21: mol_type = other RNA
ctacctgtacctggtcatnga

SEQ ID NO: 1362 - RNA, 21 nt, synthetic construct
  modified_base 1: mod_base = cm
  modified_base 2: mod_base = um
  modified_base 3: mod_base = OTHER; note = 2'-O-methyladenosine
  modified_base 4: mod_base = cm
  modified_base 5: mod_base = cm
  modified_base 6: mod_base = um
  modified_base 7: mod_base = gm
  modified_base 8: mod_base = um
  modified_base 9: mod_base = OTHER; note = 2'-fluoroadenosine
  modified_base 10: mod_base = OTHER; note = 2'-fluorocytidine
  modified_base 11: mod_base = OTHER; note = 2'-fluorocytidine
  modified_base 12: mod_base = um
  modified_base 13: mod_base = gm
  modified_base 14: mod_base = gm
  modified_base 15: mod_base = um
  modified_base 16: mod_base = um
  modified_base 17: mod_base = OTHER; note = 2'-O-methyladenosine
  modified_base 18: mod_base = um
  modified_base 19: mod_base = gm
  modified_base 20: mod_base = gm
  modified_base 21: mod_base = OTHER; note = 2'-O-methyladenosine
  source 1..21: mol_type = other RNA
ctacctgtacctggttatgga

SEQ ID NO: 1363 - RNA, 21 nt, synthetic construct
  modified_base 1: mod_base = OTHER; note = 2'-O-methyladenosine
  modified_base 2: mod_base = cm
  modified_base 3: mod_base = OTHER; note = 2'-O-methyladenosine
  modified_base 4: mod_base = cm
  modified_base 5: mod_base = um
  modified_base 6: mod_base = gm
  modified_base 7: mod_base = cm
  modified_base 8: mod_base = um
  modified_base 9: mod_base = OTHER; note = 2'-fluoroguanosine
  modified_base 10: mod_base = OTHER; note = 2'-fluoroadenosine
  modified_base 11: mod_base = OTHER; note = 2'-fluoroguanosine
  modified_base 12: mod_base = cm
  modified_base 13: mod_base = OTHER; note = 2'-O-methyladenosine
  modified_base 14: mod_base = OTHER; note = 2'-O-methyladenosine
  modified_base 15: mod_base = gm
  modified_base 16: mod_base = um
  modified_base 17: mod_base = um
  modified_base 18: mod_base = um
  modified_base 19: mod_base = OTHER; note = 2'-O-methylinosine
  modified_base 20: mod_base = gm
  modified_base 21: mod_base = OTHER; note = 2'-O-methyladenosine
  source 1..21: mol_type = other RNA
acactgctgagcaagtttnga

SEQ ID NO: 1364 - RNA, 21 nt, synthetic construct
  modified_base 1: mod_base = um
  modified_base 2: mod_base = gm
  modified_base 3: mod_base = cm
  modified_base 4: mod_base = cm
  modified_base 5: mod_base = OTHER; note = 2'-O-methyladenosine
  modified_base 6: mod_base = um
  modified_base 7: mod_base = gm
  modified_base 8: mod_base = OTHER; note = 2'-O-methyladenosine
  modified_base 9: mod_base = OTHER; note = 2'-fluoroadenosine
  modified_base 10: mod_base = OTHER; note = 2'-fluoroguanosine
  modified_base 11: mod_base = OTHER; note = 2'-fluoroadenosine
  modified_base 12: mod_base = um
  modified_base 13: mod_base = cm
  modified_base 14: mod_base = OTHER; note = 2'-O-methyladenosine
  modified_base 15: mod_base = um
  modified_base 16: mod_base = gm
  modified_base 17: mod_base = OTHER; note = 2'-O-methyladenosine
  modified_base 18: mod_base = OTHER; note = 2'-O-methyladenosine
  modified_base 19: mod_base = cm
  modified_base 20: mod_base = OTHER; note = 2'-O-methyladenosine
  modified_base 21: mod_base = OTHER; note = 2'-O-methyladenosine
  source 1..21: mol_type = other RNA
tgccatgaagatcatgaacaa

SEQ ID NO: 1365 - RNA, 21 nt, synthetic construct
  modified_base 1: mod_base = cm
  modified_base 2: mod_base = cm
  modified_base 3: mod_base = OTHER; note = 2'-O-methyladenosine
  modified_base 4: mod_base = um
  modified_base 5: mod_base = gm
  modified_base 6: mod_base = OTHER; note = 2'-O-methyladenosine
  modified_base 7: mod_base = OTHER; note = 2'-O-methyladenosine
  modified_base 8: mod_base = gm
  modified_base 9: mod_base = OTHER; note = 2'-fluoroadenosine
  modified_base 10: mod_base = OTHER; note = 2'-fluorouridine
  modified_base 11: mod_base = OTHER; note = 2'-fluorocytidine
  modified_base 12: mod_base = OTHER; note = 2'-O-methyladenosine
  modified_base 13: mod_base = um
  modified_base 14: mod_base = gm
  modified_base 15: mod_base = OTHER; note = 2'-O-methyladenosine
  modified_base 16: mod_base = OTHER; note = 2'-O-methyladenosine
  modified_base 17: mod_base = cm
  modified_base 18: mod_base = OTHER; note = 2'-O-methyladenosine
  modified_base 19: mod_base = OTHER; note = 2'-O-methyladenosine
  modified_base 20: mod_base = gm
  modified_base 21: mod_base = um
  source 1..21: mol_type = other RNA
ccatgaagatcatgaacaagt

SEQ ID NO: 1366 - RNA, 21 nt, synthetic construct
  modified_base 1: mod_base = cm
  modified_base 2: mod_base = OTHER; note = 2'-O-methyladenosine
  modified_base 3: mod_base = um
  modified_base 4: mod_base = gm
  modified_base 5: mod_base = OTHER; note = 2'-O-methyladenosine
  modified_base 6: mod_base = OTHER; note = 2'-O-methyladenosine
  modified_base 7: mod_base = gm
  modified_base 8: mod_base = OTHER; note = 2'-O-methyladenosine
  modified_base 9: mod_base = OTHER; note = 2'-fluorouridine
  modified_base 10: mod_base = OTHER; note = 2'-fluorocytidine
  modified_base 11: mod_base = OTHER; note = 2'-fluoroadenosine
  modified_base 12: mod_base = um
  modified_base 13: mod_base = gm
  modified_base 14: mod_base = OTHER; note = 2'-O-methyladenosine
  modified_base 15: mod_base = OTHER; note = 2'-O-methyladenosine
  modified_base 16: mod_base = cm
  modified_base 17: mod_base = OTHER; note = 2'-O-methyladenosine
  modified_base 18: mod_base = OTHER; note = 2'-O-methyladenosine
  modified_base 19: mod_base = gm
  modified_base 20: mod_base = um
  modified_base 21: mod_base = OTHER; note = 2'-O-methyladenosine
  source 1..21: mol_type = other RNA
catgaagatcatgaacaagta

SEQ ID NO: 1367 - RNA, 21 nt, synthetic construct
  modified_base 1: mod_base = um
  modified_base 2: mod_base = gm
  modified_base 3: mod_base = cm
  modified_base 4: mod_base = um
  modified_base 5: mod_base = gm
  modified_base 6: mod_base = OTHER; note = 2'-O-methyladenosine
  modified_base 7: mod_base = cm
  modified_base 8: mod_base = OTHER; note = 2'-O-methyladenosine
  modified_base 9: mod_base = OTHER; note = 2'-fluorocytidine
  modified_base 10: mod_base = OTHER; note = 2'-fluorouridine
  modified_base 11: mod_base = OTHER; note = 2'-fluoroguanosine
  modified_base 12: mod_base = cm
  modified_base 13: mod_base = um
  modified_base 14: mod_base = gm
  modified_base 15: mod_base = OTHER; note = 2'-O-methyladenosine
  modified_base 16: mod_base = OTHER; note = 2'-O-methylinosine
  modified_base 17: mod_base = cm
  modified_base 18: mod_base = OTHER; note = 2'-O-methyladenosine
  modified_base 19: mod_base = OTHER; note = 2'-O-methyladenosine
  modified_base 20: mod_base = gm
  modified_base 21: mod_base = um
  source 1..21: mol_type = other RNA
tgctgacactgctgancaagt

SEQ ID NO: 1368 - RNA, 21 nt, synthetic construct
  modified_base 1: mod_base = um
  modified_base 2: mod_base = gm
  modified_base 3: mod_base = OTHER; note = 2'-O-methyladenosine
  modified_base 4: mod_base = cm
  modified_base 5: mod_base = OTHER; note = 2'-O-methyladenosine
  modified_base 6: mod_base = cm
  modified_base 7: mod_base = um
  modified_base 8: mod_base = gm
  modified_base 9: mod_base = OTHER; note = 2'-fluorocytidine
  modified_base 10: mod_base = OTHER; note = 2'-fluorouridine
  modified_base 11: mod_base = OTHER; note = 2'-fluoroguanosine
  modified_base 12: mod_base = OTHER; note = 2'-O-methyladenosine
  modified_base 13: mod_base = gm
  modified_base 14: mod_base = cm
  modified_base 15: mod_base = OTHER; note = 2'-O-methyladenosine
  modified_base 16: mod_base = OTHER; note = 2'-O-methyladenosine
  modified_base 17: mod_base = gm
  modified_base 18: mod_base = um
  modified_base 19: mod_base = um
  modified_base 20: mod_base = um
  modified_base 21: mod_base = OTHER; note = 2'-O-methyladenosine
  source 1..21: mol_type = other RNA
tgacactgctgagcaagttta

SEQ ID NO: 1369 - RNA, 21 nt, synthetic construct
  modified_base 1: mod_base = gm
  modified_base 2: mod_base = cm
  modified_base 3: mod_base = OTHER; note = 2'-O-methyladenosine
  modified_base 4: mod_base = um
  modified_base 5: mod_base = cm
  modified_base 6: mod_base = OTHER; note = 2'-O-methyladenosine
  modified_base 7: mod_base = OTHER; note = 2'-O-methyladenosine
  modified_base 8: mod_base = OTHER; note = 2'-O-methyladenosine
  modified_base 9: mod_base = OTHER; note = 2'-fluorocytidine
  modified_base 10: mod_base = OTHER; note = 2'-fluorocytidine
  modified_base 11: mod_base = OTHER; note = 2'-fluorocytidine
  modified_base 12: mod_base = gm
  modified_base 13: mod_base = OTHER; note = 2'-O-methyladenosine
  modified_base 14: mod_base = cm
  modified_base 15: mod_base = OTHER; note = 2'-O-methyladenosine
  modified_base 16: mod_base = OTHER; note = 2'-O-methyladenosine
  modified_base 17: mod_base = cm
  modified_base 18: mod_base = OTHER; note = 2'-O-methyladenosine
  modified_base 19: mod_base = um
  modified_base 20: mod_base = cm
  modified_base 21: mod_base = OTHER; note = 2'-O-methyladenosine
  source 1..21: mol_type = other RNA
gcatcaaacccgacaacatca

SEQ ID NO: 1370 - RNA, 21 nt, synthetic construct
  modified_base 1: mod_base = gm
  modified_base 2: mod_base = cm
  modified_base 3: mod_base = OTHER; note = 2'-O-methyladenosine
  modified_base 4: mod_base = OTHER; note = 2'-O-methyladenosine
  modified_base 5: mod_base = OTHER; note = 2'-O-methyladenosine
  modified_base 6: mod_base = cm
  modified_base 7: mod_base = cm
  modified_base 8: mod_base = cm
  modified_base 9: mod_base = OTHER; note = 2'-fluoroguanosine
  modified_base 10: mod_base = OTHER; note = 2'-fluoroadenosine
  modified_base 11: mod_base = OTHER; note = 2'-fluorocytidine
  modified_base 12: mod_base = OTHER; note = 2'-O-methyladenosine
  modified_base 13: mod_base = OTHER; note = 2'-O-methyladenosine
  modified_base 14: mod_base = cm
  modified_base 15: mod_base = OTHER; note = 2'-O-methyladenosine
  modified_base 16: mod_base = um
  modified_base 17: mod_base = cm
  modified_base 18: mod_base = cm
  modified_base 19: mod_base = um
  modified_base 20: mod_base = OTHER; note = 2'-O-methylinosine
  modified_base 21: mod_base = OTHER; note = 2'-O-methyladenosine
  source 1..21: mol_type = other RNA
gcaaacccgacaacatcctna

SEQ ID NO: 1371 - RNA, 21 nt, synthetic construct
  modified_base 1: mod_base = gm
  modified_base 2: mod_base = cm
  modified_base 3: mod_base = OTHER; note = 2'-O-methyladenosine
  modified_base 4: mod_base = OTHER; note = 2'-O-methyladenosine
  modified_base 5: mod_base = OTHER; note = 2'-O-methyladenosine
  modified_base 6: mod_base = cm
  modified_base 7: mod_base = cm
  modified_base 8: mod_base = cm
  modified_base 9: mod_base = OTHER; note = 2'-fluoroguanosine
  modified_base 10: mod_base = OTHER; note = 2'-fluoroadenosine
  modified_base 11: mod_base = OTHER; note = 2'-fluorocytidine
  modified_base 12: mod_base = OTHER; note = 2'-O-methyladenosine
  modified_base 13: mod_base = OTHER; note = 2'-O-methyladenosine
  modified_base 14: mod_base = cm
  modified_base 15: mod_base = OTHER; note = 2'-O-methyladenosine
  modified_base 16: mod_base = um
  modified_base 17: mod_base = cm
  modified_base 18: mod_base = um
  modified_base 19: mod_base = um
  modified_base 20: mod_base = gm
  modified_base 21: mod_base = OTHER; note = 2'-O-methyladenosine
  source 1..21: mol_type = other RNA
gcaaacccgacaacatcttga

SEQ ID NO: 1372 - RNA, 21 nt, synthetic construct
  modified_base 1: mod_base = cm
  modified_base 2: mod_base = OTHER; note = 2'-O-methyladenosine
  modified_base 3: mod_base = OTHER; note = 2'-O-methyladenosine
  modified_base 4: mod_base = gm
  modified_base 5: mod_base = OTHER; note = 2'-O-methyladenosine
  modified_base 6: mod_base = um
  modified_base 7: mod_base = cm
  modified_base 8: mod_base = gm
  modified_base 9: mod_base = OTHER; note = 2'-fluorouridine
  modified_base 10: mod_base = OTHER; note = 2'-fluorocytidine
  modified_base 11: mod_base = OTHER; note = 2'-fluorocytidine
  modified_base 12: mod_base = OTHER; note = 2'-O-methyladenosine
  modified_base 13: mod_base = cm
  modified_base 14: mod_base = um
  modified_base 15: mod_base = OTHER; note = 2'-O-methyladenosine
  modified_base 16: mod_base = cm
  modified_base 17: mod_base = OTHER; note = 2'-O-methyladenosine
  modified_base 18: mod_base = OTHER; note = 2'-O-methyladenosine
  modified_base 19: mod_base = OTHER; note = 2'-O-methylinosine
  modified_base 20: mod_base = gm
  modified_base 21: mod_base = OTHER; note = 2'-O-methyladenosine
  source 1..21: mol_type = other RNA
caagatcgtccactacaanga

SEQ ID NO: 1373 - RNA, 21 nt, synthetic construct
  modified_base 1: mod_base = cm
  modified_base 2: mod_base = um
  modified_base 3: mod_base = OTHER; note = 2'-O-methyladenosine
  modified_base 4: mod_base = cm
  modified_base 5: mod_base = OTHER; note = 2'-O-methyladenosine
  modified_base 6: mod_base = OTHER; note = 2'-O-methyladenosine
  modified_base 7: mod_base = gm
  modified_base 8: mod_base = gm
  modified_base 9: mod_base = OTHER; note = 2'-fluoroadenosine
  modified_base 10: mod_base = OTHER; note = 2'-fluoroguanosine
  modified_base 11: mod_base = OTHER; note = 2'-fluorocytidine
  modified_base 12: mod_base = OTHER; note = 2'-O-methyladenosine
  modified_base 13: mod_base = cm
  modified_base 14: mod_base = cm
  modified_base 15: mod_base = um
  modified_base 16: mod_base = cm
  modified_base 17: mod_base = um
  modified_base 18: mod_base = um
  modified_base 19: mod_base = um
  modified_base 20: mod_base = cm
  modified_base 21: mod_base = um
  source 1..21: mol_type = other RNA
ctacaaggagcacctctttct

SEQ ID NO: 1374 - RNA, 21 nt, synthetic construct
  modified_base 1: mod_base = cm
  modified_base 2: mod_base = um
  modified_base 3: mod_base = OTHER; note = 2'-O-methyladenosine
  modified_base 4: mod_base = cm
  modified_base 5: mod_base = OTHER; note = 2'-O-methyladenosine
  modified_base 6: mod_base = OTHER; note = 2'-O-methyladenosine
  modified_base 7: mod_base = gm
  modified_base 8: mod_base = gm
  modified_base 9: mod_base = OTHER; note = 2'-fluoroadenosine
  modified_base 10: mod_base = OTHER; note = 2'-fluoroguanosine
  modified_base 11: mod_base = OTHER; note = 2'-fluorocytidine
  modified_base 12: mod_base = OTHER; note = 2'-O-methyladenosine
  modified_base 13: mod_base = cm
  modified_base 14: mod_base = cm
  modified_base 15: mod_base = um
  modified_base 16: mod_base = um
  modified_base 17: mod_base = um
  modified_base 18: mod_base = cm
  modified_base 19: mod_base = um
  modified_base 20: mod_base = cm
  modified_base 21: mod_base = um
  source 1..21: mol_type = other RNA
ctacaaggagcacctttctct

SEQ ID NO: 1375 - RNA, 21 nt, synthetic construct
  modified_base 1: mod_base = cm
  modified_base 2: mod_base = gm
  modified_base 3: mod_base = gm
  modified_base 4: mod_base = OTHER; note = 2'-O-methyladenosine
  modified_base 5: mod_base = cm
  modified_base 6: mod_base = OTHER; note = 2'-O-methyladenosine
  modified_base 7: mod_base = cm
  modified_base 8: mod_base = OTHER; note = 2'-O-methyladenosine
  modified_base 9: mod_base = OTHER; note = 2'-fluorouridine
  modified_base 10: mod_base = OTHER; note = 2'-fluorocytidine
  modified_base 11: mod_base = OTHER; note = 2'-fluorocytidine
  modified_base 12: mod_base = cm
  modified_base 13: mod_base = um
  modified_base 14: mod_base = um
  modified_base 15: mod_base = cm
  modified_base 16: mod_base = um
  modified_base 17: mod_base = um
  modified_base 18: mod_base = cm
  modified_base 19: mod_base = um
  modified_base 20: mod_base = um
  modified_base 21: mod_base = um
  source 1..21: mol_type = other RNA
cggacacatcccttcttcttt

SEQ ID NO: 1376 - RNA, 21 nt, synthetic construct
  modified_base 1: mod_base = gm
  modified_base 2: mod_base = OTHER; note = 2'-O-methyladenosine
  modified_base 3: mod_base = cm
  modified_base 4: mod_base = OTHER; note = 2'-O-methyladenosine
  modified_base 5: mod_base = cm
  modified_base 6: mod_base = OTHER; note = 2'-O-methyladenosine
  modified_base 7: mod_base = um
  modified_base 8: mod_base = cm
  modified_base 9: mod_base = OTHER; note = 2'-fluorocytidine
  modified_base 10: mod_base = OTHER; note = 2'-fluorocytidine
  modified_base 11: mod_base = OTHER; note = 2'-fluorouridine
  modified_base 12: mod_base = um
  modified_base 13: mod_base = cm
  modified_base 14: mod_base = um
  modified_base 15: mod_base = um
  modified_base 16: mod_base = cm
  modified_base 17: mod_base = um
  modified_base 18: mod_base = um
  modified_base 19: mod_base = um
  modified_base 20: mod_base = gm
  modified_base 21: mod_base = OTHER; note = 2'-O-methyladenosine
  source 1..21: mol_type = other RNA
gacacatcccttcttctttga

SEQ ID NO: 1377 - RNA, 21 nt, synthetic construct
  modified_base 1: mod_base = cm
  modified_base 2: mod_base = cm
  modified_base 3: mod_base = um
  modified_base 4: mod_base = um
  modified_base 5: mod_base = um
  modified_base 6: mod_base = OTHER; note = 2'-O-methyladenosine
  modified_base 7: mod_base = cm
  modified_base 8: mod_base = OTHER; note = 2'-O-methyladenosine
  modified_base 9: mod_base = OTHER; note = 2'-fluorocytidine
  modified_base 10: mod_base = OTHER; note = 2'-fluorocytidine
  modified_base 11: mod_base = OTHER; note = 2'-fluoroguanosine
  modified_base 12: mod_base = gm
  modified_base 13: mod_base = OTHER; note = 2'-O-methyladenosine
  modified_base 14: mod_base = um
  modified_base 15: mod_base = um
  modified_base 16: mod_base = um
  modified_base 17: mod_base = cm
  modified_base 18: mod_base = gm
  modified_base 19: mod_base = OTHER; note = 2'-O-methyladenosine
  modified_base 20: mod_base = OTHER; note = 2'-O-methyladenosine
  modified_base 21: mod_base = OTHER; note = 2'-O-methyladenosine
  source 1..21: mol_type = other RNA
cctttacaccggatttcgaaa

SEQ ID NO: 1378 - RNA, 21 nt, synthetic construct
  modified_base 1: mod_base = um
  modified_base 2: mod_base = OTHER; note = 2'-O-methyladenosine
  modified_base 3: mod_base = cm
  modified_base 4: mod_base = OTHER; note = 2'-O-methyladenosine
  modified_base 5: mod_base = cm
  modified_base 6: mod_base = cm
  modified_base 7: mod_base = gm
  modified_base 8: mod_base = gm
  modified_base 9: mod_base = OTHER; note = 2'-fluoroadenosine
  modified_base 10: mod_base = OTHER; note = 2'-fluorouridine
  modified_base 11: mod_base = OTHER; note = 2'-fluorouridine
  modified_base 12: mod_base = um
  modified_base 13: mod_base = cm
  modified_base 14: mod_base = gm
  modified_base 15: mod_base = OTHER; note = 2'-O-methyladenosine
  modified_base 16: mod_base = OTHER; note = 2'-O-methyladenosine
  modified_base 17: mod_base = gm
  modified_base 18: mod_base = OTHER; note = 2'-O-methylinosine
  modified_base 19: mod_base = um
  modified_base 20: mod_base = gm
  modified_base 21: mod_base = OTHER; note = 2'-O-methyladenosine
  source 1..21: mol_type = other RNA
tacaccggatttcgaagntga

SEQ ID NO: 1379 - RNA, 21 nt, synthetic construct
  modified_base 1: mod_base = cm
  modified_base 2: mod_base = OTHER; note = 2'-O-methyladenosine
  modified_base 3: mod_base = cm
  modified_base 4: mod_base = cm
  modified_base 5: mod_base = gm
  modified_base 6: mod_base = OTHER; note = 2'-O-methyladenosine
  modified_base 7: mod_base = cm
  modified_base 8: mod_base = OTHER; note = 2'-O-methyladenosine
  modified_base 9: mod_base = OTHER; note = 2'-fluorocytidine
  modified_base 10: mod_base = OTHER; note = 2'-fluoroadenosine
  modified_base 11: mod_base = OTHER; note = 2'-fluorouridine
  modified_base 12: mod_base = gm
  modified_base 13: mod_base = cm
  modified_base 14: mod_base = OTHER; note = 2'-O-methyladenosine
  modified_base 15: mod_base = OTHER; note = 2'-O-methyladenosine
  modified_base 16: mod_base = cm
  modified_base 17: mod_base = um
  modified_base 18: mod_base = um
  modified_base 19: mod_base = cm
  modified_base 20: mod_base = OTHER; note = 2'-O-methylinosine
  modified_base 21: mod_base = OTHER; note = 2'-O-methyladenosine
  source 1..21: mol_type = other RNA
caccgacacatgcaacttcna

SEQ ID NO: 1380 - RNA, 21 nt, synthetic construct
  modified_base 1: mod_base = cm
  modified_base 2: mod_base = cm
  modified_base 3: mod_base = gm
  modified_base 4: mod_base = OTHER; note = 2'-O-methyladenosine
  modified_base 5: mod_base = cm
  modified_base 6: mod_base = OTHER; note = 2'-O-methyladenosine
  modified_base 7: mod_base = cm
  modified_base 8: mod_base = OTHER; note = 2'-O-methyladenosine
  modified_base 9: mod_base = OTHER; note = 2'-fluorouridine
  modified_base 10: mod_base = OTHER; note = 2'-fluoroguanosine
  modified_base 11: mod_base = OTHER; note = 2'-fluorocytidine
  modified_base 12: mod_base = OTHER; note = 2'-O-methyladenosine
  modified_base 13: mod_base = OTHER; note = 2'-O-methyladenosine
  modified_base 14: mod_base = cm
  modified_base 15: mod_base = um
  modified_base 16: mod_base = um
  modified_base 17: mod_base = cm
  modified_base 18: mod_base = OTHER; note = 2'-O-methylinosine
  modified_base 19: mod_base = OTHER; note = 2'-O-methyladenosine
  modified_base 20: mod_base = cm
  modified_base 21: mod_base = um
  source 1..21: mol_type = other RNA
ccgacacatgcaacttcnact

SEQ ID NO: 1381 - RNA, 21 nt, synthetic construct
  modified_base 1: mod_base = OTHER; note = 2'-O-methyladenosine
  modified_base 2: mod_base = cm
  modified_base 3: mod_base = OTHER; note = 2'-O-methyladenosine
  modified_base 4: mod_base = um
  modified_base 5: mod_base = gm
  modified_base 6: mod_base = cm
  modified_base 7: mod_base = OTHER; note = 2'-O-methyladenosine
  modified_base 8: mod_base = OTHER; note = 2'-O-methyladenosine
  modified_base 9: mod_base = OTHER; note = 2'-fluorocytidine
  modified_base 10: mod_base = OTHER; note = 2'-fluorouridine
  modified_base 11: mod_base = OTHER; note = 2'-fluorouridine
  modified_base 12: mod_base = cm
  modified_base 13: mod_base = gm
  modified_base 14: mod_base = OTHER; note = 2'-O-methyladenosine
  modified_base 15: mod_base = cm
  modified_base 16: mod_base = um
  modified_base 17: mod_base = um
  modified_base 18: mod_base = OTHER; note = 2'-O-methylinosine
  modified_base 19: mod_base = gm
  modified_base 20: mod_base = um
  modified_base 21: mod_base = OTHER; note = 2'-O-methyladenosine
  source 1..21: mol_type = other RNA
acatgcaacttcgacttngta

SEQ ID NO: 1382 - RNA, 21 nt, synthetic construct
  modified_base 1: mod_base = cm
  modified_base 2: mod_base = cm
  modified_base 3: mod_base = um
  modified_base 4: mod_base = gm
  modified_base 5: mod_base = gm
  modified_base 6: mod_base = um
  modified_base 7: mod_base = cm
  modified_base 8: mod_base = OTHER; note = 2'-O-methyladenosine
  modified_base 9: mod_base = OTHER; note = 2'-fluorouridine
  modified_base 10: mod_base = gm
  modified_base 11: mod_base = OTHER; note = 2'-fluoroguanosine
  modified_base 12: mod_base = OTHER; note = 2'-fluoroadenosine
  modified_base 13: mod_base = gm
  modified_base 14: mod_base = um
  modified_base 15: mod_base = OTHER; note = 2'-O-methyladenosine
  modified_base 16: mod_base = um
  modified_base 17: mod_base = um
  modified_base 18: mod_base = OTHER; note = 2'-O-methyladenosine
  modified_base 19: mod_base = cm
  modified_base 20: mod_base = gm
  modified_base 21: mod_base = um
  source 1..21: mol_type = other RNA
cctggtcatggagtattacgt

SEQ ID NO: 1383 - RNA, 21 nt, synthetic construct
  modified_base 1: mod_base = cm
  modified_base 2: mod_base = OTHER; note = 2'-O-methyladenosine
  modified_base 3: mod_base = cm
  modified_base 4: mod_base = cm
  modified_base 5: mod_base = gm
  modified_base 6: mod_base = OTHER; note = 2'-O-methyladenosine
  modified_base 7: mod_base = cm
  modified_base 8: mod_base = OTHER; note = 2'-O-methyladenosine
  modified_base 9: mod_base = OTHER; note = 2'-fluorocytidine
  modified_base 10: mod_base = OTHER; note = 2'-fluoroadenosine
  modified_base 11: mod_base = OTHER; note = 2'-fluorouridine
  modified_base 12: mod_base = gm
  modified_base 13: mod_base = cm
  modified_base 14: mod_base = OTHER; note = 2'-O-methyladenosine
  modified_base 15: mod_base = OTHER; note = 2'-O-methyladenosine
  modified_base 16: mod_base = cm
  modified_base 17: mod_base = um
  modified_base 18: mod_base = um
  modified_base 19: mod_base = um
  modified_base 20: mod_base = gm
  modified_base 21: mod_base = OTHER; note = 2'-O-methyladenosine
  source 1..21: mol_type = other RNA
caccgacacatgcaactttga

SEQ ID NO: 1384 - RNA, 21 nt, synthetic construct
  modified_base 1: mod_base = cm
  modified_base 2: mod_base = OTHER; note = 2'-O-methyladenosine
  modified_base 3: mod_base = cm
  modified_base 4: mod_base = cm
  modified_base 5: mod_base = gm
  modified_base 6: mod_base = OTHER; note = 2'-O-methyladenosine
  modified_base 7: mod_base = cm
  modified_base 8: mod_base = OTHER; note = 2'-O-methyladenosine
  modified_base 9: mod_base = OTHER; note = 2'-fluorocytidine
  modified_base 10: mod_base = OTHER; note = 2'-O-methyladenosine
  modified_base 11: mod_base = OTHER; note = 2'-fluorouridine
  modified_base 12: mod_base = gm
  modified_base 13: mod_base = cm
  modified_base 14: mod_base = OTHER; note = 2'-O-methyladenosine
  modified_base 15: mod_base = OTHER; note = 2'-O-methyladenosine
  modified_base 16: mod_base = cm
  modified_base 17: mod_base = um
  modified_base 18: mod_base = um
  modified_base 19: mod_base = cm
  modified_base 20: mod_base = OTHER; note = 2'-O-methylinosine
  modified_base 21: mod_base = OTHER; note = 2'-O-methyladenosine
  source 1..21: mol_type = other RNA
caccgacacatgcaacttcna

SEQ ID NO: 1385 - RNA, 21 nt, synthetic construct
  modified_base 1: mod_base = cm
  modified_base 2: mod_base = OTHER; note = 2'-O-methyladenosine
  modified_base 3: mod_base = cm
  modified_base 4: mod_base = cm
  modified_base 5: mod_base = gm
  modified_base 6: mod_base = OTHER; note = 2'-O-methyladenosine
  modified_base 7: mod_base = OTHER; note = 2'-fluorocytidine
  modified_base 8: mod_base = OTHER; note = 2'-O-methyladenosine
  modified_base 9: mod_base = OTHER; note = 2'-fluorocytidine
  modified_base 10: mod_base = OTHER; note = 2'-O-methyladenosine
  modified_base 11: mod_base = OTHER; note = 2'-fluorouridine
  modified_base 12: mod_base = gm
  modified_base 13: mod_base = cm
  modified_base 14: mod_base = OTHER; note = 2'-O-methyladenosine
  modified_base 15: mod_base = OTHER; note = 2'-O-methyladenosine
  modified_base 16: mod_base = cm
  modified_base 17: mod_base = um
  modified_base 18: mod_base = um
  modified_base 19: mod_base = cm
  modified_base 20: mod_base = OTHER; note = 2'-O-methylinosine
  modified_base 21: mod_base = OTHER; note = 2'-O-methyladenosine
  source 1..21: mol_type = other RNA
caccgacacatgcaacttcna

SEQ ID NO: 1386 - RNA, 21 nt, synthetic construct
  modified_base 1: mod_base = cm
  modified_base 2: mod_base = cm
  modified_base 3: mod_base = um
  modified_base 4: mod_base = cm
  modified_base 5: mod_base = gm
  modified_base 6: mod_base = gm
  modified_base 7: mod_base = um
  modified_base 8: mod_base = OTHER; note = 2'-O-methyladenosine
  modified_base 9: mod_base = OTHER; note = 2'-fluorouridine
  modified_base 10: mod_base = OTHER; note = 2'-fluorouridine
  modified_base 11: mod_base = OTHER; note = 2'-fluorouridine
  modified_base 12: mod_base = OTHER; note = 2'-O-methyladenosine
  modified_base 13: mod_base = um
  modified_base 14: mod_base = um
  modified_base 15: mod_base = gm
  modified_base 16: mod_base = um
  modified_base 17: mod_base = um
  modified_base 18: mod_base = um
  modified_base 19: mod_base = gm
  modified_base 20: mod_base = um
  modified_base 21: mod_base = OTHER; note = 2'-O-methyladenosine
  source 1..21: mol_type = other RNA
cctcggtatttattgtttgta

SEQ ID NO: 1387 - RNA, 21 nt, synthetic construct
  modified_base 1: mod_base = cm
  modified_base 2: mod_base = cm
  modified_base 3: mod_base = um
  modified_base 4: mod_base = cm
  modified_base 5: mod_base = gm
  modified_base 6: mod_base = gm
  modified_base 7: mod_base = um
  modified_base 8: mod_base = OTHER; note = 2'-O-methyladenosine
  modified_base 9: mod_base = OTHER; note = 2'-fluorouridine
  modified_base 10: mod_base = OTHER; note = 2'-fluorouridine
  modified_base 11: mod_base = OTHER; note = 2'-fluorouridine
  modified_base 12: mod_base = OTHER; note = 2'-O-methyladenosine
  modified_base 13: mod_base = um
  modified_base 14: mod_base = um
  modified_base 15: mod_base = gm
  modified_base 16: mod_base = um
  modified_base 17: mod_base = cm
  modified_base 18: mod_base = um
  modified_base 19: mod_base = gm
  modified_base 20: mod_base = um
  modified_base 21: mod_base = OTHER; note = 2'-O-methyladenosine
  source 1..21: mol_type = other RNA
cctcggtatttattgtctgta

SEQ ID NO: 1388 - RNA, 21 nt, synthetic construct
  modified_base 1: mod_base = cm
  modified_base 2: mod_base = cm
  modified_base 3: mod_base = um
  modified_base 4: mod_base = cm
  modified_base 5: mod_base = gm
  modified_base 6: mod_base = gm
  modified_base 7: mod_base = um
  modified_base 8: mod_base = OTHER; note = 2'-O-methyladenosine
  modified_base 9: mod_base = OTHER; note = 2'-fluorouridine
  modified_base 10: mod_base = OTHER; note = 2'-fluorouridine
  modified_base 11: mod_base = OTHER; note = 2'-fluorouridine
  modified_base 12: mod_base = OTHER; note = 2'-O-methyladenosine
  modified_base 13: mod_base = um
  modified_base 14: mod_base = um
  modified_base 15: mod_base = gm
  modified_base 16: mod_base = um
  modified_base 17: mod_base = cm
  modified_base 18: mod_base = um
  modified_base 19: mod_base = OTHER; note = 2'-O-methylinosine
  modified_base 20: mod_base = um
  modified_base 21: mod_base = OTHER; note = 2'-O-methyladenosine
  source 1..21: mol_type = other RNA
cctcggtatttattgtctnta

SEQ ID NO: 1389 - RNA, 21 nt, synthetic construct
  modified_base 1: mod_base = cm
  modified_base 2: mod_base = cm
  modified_base 3: mod_base = um
  modified_base 4: mod_base = gm
  modified_base 5: mod_base = gm
  modified_base 6: mod_base = um
  modified_base 7: mod_base = cm
  modified_base 8: mod_base = OTHER; note = 2'-O-methyladenosine
  modified_base 9: mod_base = OTHER; note = 2'-fluorouridine
  modified_base 10: mod_base = gm
  modified_base 11: mod_base = OTHER; note = 2'-fluoroguanosine
  modified_base 12: mod_base = OTHER; note = 2'-fluoroadenosine
  modified_base 13: mod_base = gm
  modified_base 14: mod_base = um
  modified_base 15: mod_base = OTHER; note = 2'-O-methyladenosine
  modified_base 16: mod_base = um
  modified_base 17: mod_base = um
  modified_base 18: mod_base = OTHER; note = 2'-O-methyladenosine
  modified_base 19: mod_base = cm
  modified_base 20: mod_base = gm
  modified_base 21: mod_base = OTHER; note = 2'-O-methyladenosine
  source 1..21: mol_type = other RNA
cctggtcatggagtattacga

SEQ ID NO: 1390 - RNA, 19 nt, synthetic construct
  modified_base 1: mod_base = cm
  modified_base 1^2: mod_base = OTHER; note = phosphorothioate linkage
  modified_base 2: mod_base = cm
  modified_base 2^3: mod_base = OTHER; note = phosphorothioate linkage
  modified_base 3: mod_base = cm
  modified_base 4: mod_base = um
  modified_base 5: mod_base = OTHER; note = 2'-O-methyladenosine
  modified_base 6: mod_base = gm
  modified_base 7: mod_base = OTHER; note = 2'-fluoroadenosine
  modified_base 8: mod_base = OTHER; note = 2'-fluoroadenosine
  modified_base 9: mod_base = OTHER; note = 2'-fluorocytidine
  modified_base 10: mod_base = um
  modified_base 11: mod_base = gm
  modified_base 12: mod_base = um
  modified_base 13: mod_base = cm
  modified_base 14: mod_base = um
  modified_base 15: mod_base = um
  modified_base 16: mod_base = cm
  modified_base 17: mod_base = gm
  modified_base 17^18: mod_base = OTHER; note = phosphorothioate linkage
  modified_base 18: mod_base = OTHER; note = 2'-O-methyladenosine
  modified_base 18^19: mod_base = OTHER; note = phosphorothioate linkage
  modified_base 19: mod_base = OTHER; note = 2'-O-methyladenosine
  source 1..19: mol_type = other RNA
ccctagaactgtcttcgaa

SEQ ID NO: 1391 - RNA, 21 nt, synthetic construct
  modified_base 1: mod_base = um
  modified_base 2: mod_base = um
  modified_base 3: mod_base = cm
  modified_base 4: mod_base = cm
  modified_base 5: mod_base = um
  modified_base 6: mod_base = cm
  modified_base 7: mod_base = gm
  modified_base 8: mod_base = gm
  modified_base 9: mod_base = OTHER; note = 2'-fluorouridine
  modified_base 10: mod_base = OTHER; note = 2'-O-methyladenosine
  modified_base 11: mod_base = OTHER; note = 2'-fluorouridine
  modified_base 12: mod_base = OTHER; note = 2'-fluorouridine
  modified_base 13: mod_base = um
  modified_base 14: mod_base = OTHER; note = 2'-O-methyladenosine
  modified_base 15: mod_base = um
  modified_base 16: mod_base = um
  modified_base 17: mod_base = gm
  modified_base 18: mod_base = um
  modified_base 19: mod_base = cm
  modified_base 20: mod_base = um
  modified_base 21: mod_base = OTHER; note = 2'-O-methyladenosine
  source 1..21: mol_type = other RNA
ttcctcggtatttattgtcta

SEQ ID NO: 1392 - RNA, 21 nt, synthetic construct
  modified_base 1: mod_base = cm
  modified_base 2: mod_base = OTHER; note = 2'-O-methyladenosine
  modified_base 3: mod_base = cm
  modified_base 4: mod_base = cm
  modified_base 5: mod_base = gm
  modified_base 6: mod_base = OTHER; note = 2'-O-methyladenosine
  modified_base 7: mod_base = cm
  modified_base 8: mod_base = OTHER; note = 2'-O-methyladenosine
  modified_base 9: mod_base = OTHER; note = 2'-fluorocytidine
  modified_base 10: mod_base = OTHER; note = 2'-O-methyladenosine
  modified_base 11: mod_base = OTHER; note = 2'-fluorouridine
  modified_base 12: mod_base = gm
  modified_base 13: mod_base = OTHER; note = 2'-fluorocytidine
  modified_base 14: mod_base = OTHER; note = 2'-O-methyladenosine
  modified_base 15: mod_base = OTHER; note = 2'-O-methyladenosine
  modified_base 16: mod_base = cm
  modified_base 17: mod_base = um
  modified_base 18: mod_base = um
  modified_base 19: mod_base = cm
  modified_base 20: mod_base = OTHER; note = 2'-O-methylinosine
  modified_base 21: mod_base = OTHER; note = 2'-O-methyladenosine
  source 1..21: mol_type = other RNA
caccgacacatgcaacttcna

SEQ ID NO: 1393 - RNA, 21 nt, synthetic construct
  modified_base 1: mod_base = gm
  modified_base 2: mod_base = OTHER; note = 2'-O-methyladenosine
  modified_base 3: mod_base = cm
  modified_base 4: mod_base = cm
  modified_base 5: mod_base = cm
  modified_base 6: mod_base = um
  modified_base 7: mod_base = OTHER; note = 2'-O-methyladenosine
  modified_base 8: mod_base = gm
  modified_base 9: mod_base = OTHER; note = 2'-fluoroadenosine
  modified_base 10: mod_base = OTHER; note = 2'-fluoroadenosine
  modified_base 11: mod_base = OTHER; note = 2'-fluorocytidine
  modified_base 12: mod_base = um
  modified_base 13: mod_base = gm
  modified_base 14: mod_base = um
  modified_base 15: mod_base = cm
  modified_base 16: mod_base = um
  modified_base 17: mod_base = um
  modified_base 18: mod_base = cm
  modified_base 19: mod_base = OTHER; note = 2'-O-methylinosine
  modified_base 20: mod_base = OTHER; note = 2'-O-methyladenosine
  modified_base 21: mod_base = OTHER; note = 2'-O-methyladenosine
  source 1..21: mol_type = other RNA
gaccctagaactgtcttcnaa

SEQ ID NO: 1394 - RNA, 21 nt, synthetic construct
  modified_base 1: mod_base = gm
  modified_base 2: mod_base = OTHER; note = 2'-O-methyladenosine
  modified_base 3: mod_base = OTHER; note = 2'-O-methyladenosine
  modified_base 4: mod_base = cm
  modified_base 5: mod_base = cm
  modified_base 6: mod_base = cm
  modified_base 7: mod_base = um
  modified_base 8: mod_base = OTHER; note = 2'-O-methyladenosine
  modified_base 9: mod_base = OTHER; note = 2'-fluoroguanosine
  modified_base 10: mod_base = OTHER; note = 2'-fluoroadenosine
  modified_base 11: mod_base = OTHER; note = 2'-fluoroadenosine
  modified_base 12: mod_base = cm
  modified_base 13: mod_base = um
  modified_base 14: mod_base = gm
  modified_base 15: mod_base = um
  modified_base 16: mod_base = cm
  modified_base 17: mod_base = um
  modified_base 18: mod_base = um
  modified_base 19: mod_base = cm
  modified_base 20: mod_base = OTHER; note = 2'-O-methylinosine
  modified_base 21: mod_base = OTHER; note = 2'-O-methyladenosine
  source 1..21: mol_type = other RNA
gaaccctagaactgtcttcna

SEQ ID NO: 1395 - RNA, 21 nt, synthetic construct
  modified_base 1: mod_base = um
  modified_base 2: mod_base = gm
  modified_base 3: mod_base = gm
  modified_base 4: mod_base = cm
  modified_base 5: mod_base = OTHER; note = 2'-O-methyladenosine
  modified_base 6: mod_base = OTHER; note = 2'-O-methyladenosine
  modified_base 7: mod_base = gm
  modified_base 8: mod_base = OTHER; note = 2'-O-methyladenosine
  modified_base 9: mod_base = OTHER; note = 2'-fluorouridine
  modified_base 10: mod_base = cm
  modified_base 11: mod_base = OTHER; note = 2'-fluoroguanosine
  modified_base 12: mod_base = OTHER; note = 2'-fluorouridine
  modified_base 13: mod_base = cm
  modified_base 14: mod_base = cm
  modified_base 15: mod_base = OTHER; note = 2'-O-methyladenosine
  modified_base 16: mod_base = cm
  modified_base 17: mod_base = um
  modified_base 18: mod_base = OTHER; note = 2'-O-methyladenosine
  modified_base 19: mod_base = cm
  modified_base 20: mod_base = OTHER; note = 2'-O-methyladenosine
  modified_base 21: mod_base = OTHER; note = 2'-O-methyladenosine
  source 1..21: mol_type = other RNA
tggcaagatcgtccactacaa

SEQ ID NO: 1396 - RNA, 21 nt, synthetic construct
  modified_base 1: mod_base = um
  modified_base 2: mod_base = gm
  modified_base 3: mod_base = gm
  modified_base 4: mod_base = cm
  modified_base 5: mod_base = OTHER; note = 2'-O-methyladenosine
  modified_base 6: mod_base = OTHER; note = 2'-O-methyladenosine
  modified_base 7: mod_base = gm
  modified_base 8: mod_base = OTHER; note = 2'-O-methyladenosine
  modified_base 9: mod_base = OTHER; note = 2'-fluorouridine
  modified_base 10: mod_base = cm
  modified_base 11: mod_base = OTHER; note = 2'-fluoroguanosine
  modified_base 12: mod_base = um
  modified_base 13: mod_base = OTHER; note = 2'-fluorocytidine
  modified_base 14: mod_base = cm
  modified_base 15: mod_base = OTHER; note = 2'-O-methyladenosine
  modified_base 16: mod_base = cm
  modified_base 17: mod_base = um
  modified_base 18: mod_base = OTHER; note = 2'-O-methyladenosine
  modified_base 19: mod_base = cm
  modified_base 20: mod_base = OTHER; note = 2'-O-methyladenosine
  modified_base 21: mod_base = OTHER; note = 2'-O-methyladenosine
  source 1..21: mol_type = other RNA
tggcaagatcgtccactacaa

SEQ ID NO: 1397 - RNA, 21 nt, synthetic construct
  modified_base 1: mod_base = cm
  modified_base 2: mod_base = cm
  modified_base 3: mod_base = um
  modified_base 4: mod_base = gm
  modified_base 5: mod_base = gm
  modified_base 6: mod_base = um
  modified_base 7: mod_base = cm
  modified_base 8: mod_base = OTHER; note = 2'-O-methyladenosine
  modified_base 9: mod_base = OTHER; note = 2'-fluorouridine
  modified_base 10: mod_base = gm
  modified_base 11: mod_base = OTHER; note = 2'-fluoroguanosine
  modified_base 12: mod_base = OTHER; note = 2'-fluoroadenosine
  modified_base 13: mod_base = gm
  modified_base 14: mod_base = um
  modified_base 15: mod_base = OTHER; note = 2'-O-methyladenosine
  modified_base 16: mod_base = um
  modified_base 17: mod_base = um
  modified_base 18: mod_base = OTHER; note = 2'-O-methyladenosine
  modified_base 19: mod_base = cm
  modified_base 20: mod_base = gm
  modified_base 21: mod_base = OTHER; note = 2'-O-methyladenosine
  source 1..21: mol_type = other RNA
cctggtcatggagtattacga

SEQ ID NO: 1398 - RNA, 19 nt, synthetic construct
  modified_base 1: mod_base = cm
  modified_base 1^2: mod_base = OTHER; note = phosphorothioate linkage
  modified_base 2: mod_base = cm
  modified_base 2^3: mod_base = OTHER; note = phosphorothioate linkage
  modified_base 3: mod_base = cm
  modified_base 4: mod_base = um
  modified_base 5: mod_base = OTHER; note = 2'-O-methyladenosine
  modified_base 6: mod_base = gm
  modified_base 7: mod_base = OTHER; note = 2'-fluoroadenosine
  modified_base 8: mod_base = OTHER; note = 2'-fluoroadenosine
  modified_base 9: mod_base = OTHER; note = 2'-fluorocytidine
  modified_base 10: mod_base = um
  modified_base 11: mod_base = gm
  modified_base 12: mod_base = um
  modified_base 13: mod_base = cm
  modified_base 14: mod_base = um
  modified_base 15: mod_base = um
  modified_base 16: mod_base = cm
  modified_base 17: mod_base = gm
  modified_base 17^18: mod_base = OTHER; note = phosphorothioate linkage
  modified_base 18: mod_base = OTHER; note = 2'-O-methyladenosine
  modified_base 18^19: mod_base = OTHER; note = phosphorothioate linkage
  modified_base 19: mod_base = OTHER; note = 2'-O-methyladenosine
  source 1..19: mol_type = other RNA
ccctagaactgtcttcgaa

SEQ ID NO: 1399 - RNA, 21 nt, synthetic construct
  modified_base 1: mod_base = cm
  modified_base 2: mod_base = cm
  modified_base 3: mod_base = um
  modified_base 4: mod_base = cm
  modified_base 5: mod_base = gm
  modified_base 6: mod_base = gm
  modified_base 7: mod_base = um
  modified_base 8: mod_base = OTHER; note = 2'-O-methyladenosine
  modified_base 9: mod_base = OTHER; note = 2'-fluorouridine
  modified_base 10: mod_base = um
  modified_base 11: mod_base = OTHER; note = 2'-fluorouridine
  modified_base 12: mod_base = OTHER; note = 2'-O-methyladenosine
  modified_base 13: mod_base = OTHER; note = 2'-fluorouridine
  modified_base 14: mod_base = um
  modified_base 15: mod_base = gm
  modified_base 16: mod_base = um
  modified_base 17: mod_base = cm
  modified_base 18: mod_base = um
  modified_base 19: mod_base = gm
  modified_base 20: mod_base = um
  modified_base 21: mod_base = OTHER; note = 2'-O-methyladenosine
  source 1..21: mol_type = other RNA
cctcggtatttattgtctgta

SEQ ID NO: 1400 - RNA, 21 nt, synthetic construct
  modified_base 1: mod_base = cm
  modified_base 2: mod_base = cm
  modified_base 3: mod_base = um
  modified_base 4: mod_base = cm
  modified_base 5: mod_base = gm
  modified_base 6: mod_base = gm
  modified_base 7: mod_base = um
  modified_base 8: mod_base = OTHER; note = 2'-O-methyladenosine
  modified_base 9: mod_base = OTHER; note = 2'-fluorouridine
  modified_base 10: mod_base = um
  modified_base 11: mod_base = OTHER; note = 2'-fluorouridine
  modified_base 12: mod_base = OTHER; note = 2'-fluoroadenosine
  modified_base 13: mod_base = um
  modified_base 14: mod_base = um
  modified_base 15: mod_base = gm
  modified_base 16: mod_base = um
  modified_base 17: mod_base = cm
  modified_base 18: mod_base = um
  modified_base 19: mod_base = gm
  modified_base 20: mod_base = um
  modified_base 21: mod_base = OTHER; note = 2'-O-methyladenosine
  source 1..21: mol_type = other RNA
cctcggtatttattgtctgta

SEQ ID NO: 1401 - RNA, 21 nt, synthetic construct
  modified_base 1: mod_base = um
  modified_base 2: mod_base = um
  modified_base 3: mod_base = cm
  modified_base 4: mod_base = cm
  modified_base 5: mod_base = um
  modified_base 6: mod_base = cm
  modified_base 7: mod_base = gm
  modified_base 8: mod_base = gm
  modified_base 9: mod_base = OTHER; note = 2'-fluorouridine
  modified_base 10: mod_base = OTHER; note = 2'-O-methyladenosine
  modified_base 11: mod_base = OTHER; note = 2'-fluorouridine
  modified_base 12: mod_base = OTHER; note = 2'-fluorouridine
  modified_base 13: mod_base = um
  modified_base 14: mod_base = OTHER; note = 2'-O-methyladenosine
  modified_base 15: mod_base = um
  modified_base 16: mod_base = um
  modified_base 17: mod_base = gm
  modified_base 18: mod_base = um
  modified_base 19: mod_base = cm
  modified_base 20: mod_base = um
  modified_base 21: mod_base = OTHER; note = 2'-O-methyladenosine
  source 1..21: mol_type = other RNA
ttcctcggtatttattgtcta

SEQ ID NO: 1402 - RNA, 21 nt, synthetic construct
  modified_base 1: mod_base = cm
  modified_base 2: mod_base = cm
  modified_base 3: mod_base = um
  modified_base 4: mod_base = gm
  modified_base 5: mod_base = gm
  modified_base 6: mod_base = um
  modified_base 7: mod_base = cm
  modified_base 8: mod_base = OTHER; note = 2'-O-methyladenosine
  modified_base 9: mod_base = OTHER; note = 2'-fluorouridine
  modified_base 10: mod_base = gm
  modified_base 11: mod_base = OTHER; note = 2'-fluoroguanosine
  modified_base 12: mod_base = OTHER; note = 2'-fluoroadenosine
  modified_base 13: mod_base = gm
  modified_base 14: mod_base = um
  modified_base 15: mod_base = OTHER; note = 2'-O-methyladenosine
  modified_base 16: mod_base = um
  modified_base 17: mod_base = um
  modified_base 18: mod_base = OTHER; note = 2'-O-methyladenosine
  modified_base 19: mod_base = cm
  modified_base 20: mod_base = gm
  modified_base 21: mod_base = OTHER; note = 2'-O-methyladenosine
  source 1..21: mol_type = other RNA
cctggtcatggagtattacga

SEQ ID NO: 1403 - RNA, 22 nt, synthetic construct
  modified_base 1: mod_base = um
  modified_base 2: mod_base = um
  modified_base 3: mod_base = cm
  modified_base 4: mod_base = cm
  modified_base 5: mod_base = um
  modified_base 6: mod_base = cm
  modified_base 7: mod_base = gm
  modified_base 8: mod_base = gm
  modified_base 9: mod_base = OTHER; note = 2'-fluorouridine
  modified_base 10: mod_base = OTHER; note = 2'-O-methyladenosine
  modified_base 11: mod_base = OTHER; note = 2'-fluorouridine
  modified_base 12: mod_base = OTHER; note = 2'-fluorouridine
  modified_base 13: mod_base = um
  modified_base 14: mod_base = OTHER; note = 2'-O-methyladenosine
  modified_base 15: mod_base = um
  modified_base 16: mod_base = um
  modified_base 17: mod_base = gm
  modified_base 18: mod_base = um
  modified_base 19: mod_base = cm
  modified_base 20: mod_base = um
  modified_base 21: mod_base = OTHER; note = 2'-O-propargyladenosine
  source 1..22: mol_type = other RNA
ttcctcggtatttattgtctaa

SEQ ID NO: 1404 - RNA, 22 nt, synthetic construct
  modified_base 1: mod_base = um
  modified_base 2: mod_base = um
  modified_base 3: mod_base = cm
  modified_base 4: mod_base = cm
  modified_base 5: mod_base = um
  modified_base 6: mod_base = cm
  modified_base 7: mod_base = gm
  modified_base 8: mod_base = gm
  modified_base 9: mod_base = OTHER; note = 2'-fluorouridine
  modified_base 10: mod_base = OTHER; note = 2'-O-methyladenosine
  modified_base 11: mod_base = OTHER; note = 2'-fluorouridine
  modified_base 12: mod_base = OTHER; note = 2'-fluorouridine
  modified_base 13: mod_base = um
  modified_base 14: mod_base = OTHER; note = 2'-O-methyladenosine
  modified_base 15: mod_base = um
  modified_base 16: mod_base = um
  modified_base 17: mod_base = gm
  modified_base 18: mod_base = um
  modified_base 19: mod_base = cm
  modified_base 20: mod_base = um
  modified_base 20^21: mod_base = OTHER; note = phosphorothioate linkage
  modified_base 21: mod_base = OTHER; note = 2'-O-propargyladenosine
  source 1..22: mol_type = other RNA
ttcctcggtatttattgtctaa

SEQ ID NO: 1405 - RNA, 21 nt, synthetic construct
  modified_base 1: mod_base = um
  modified_base 2: mod_base = um
  modified_base 3: mod_base = cm
  modified_base 4: mod_base = cm
  modified_base 5: mod_base = um
  modified_base 6: mod_base = cm
  modified_base 7: mod_base = gm
  modified_base 8: mod_base = gm
  modified_base 9: mod_base = OTHER; note = 2'-fluorouridine
  modified_base 10: mod_base = OTHER; note = 2'-O-methyladenosine
  modified_base 11: mod_base = OTHER; note = 2'-fluorouridine
  modified_base 12: mod_base = OTHER; note = 2'-fluorouridine
  modified_base 13: mod_base = um
  modified_base 14: mod_base = OTHER; note = 2'-O-methyladenosine
  modified_base 15: mod_base = um
  modified_base 16: mod_base = um
  modified_base 17: mod_base = gm
  modified_base 18: mod_base = um
  modified_base 19: mod_base = cm
  modified_base 20: mod_base = um
  modified_base 21: mod_base = OTHER; note = 2'-O-methyladenosine
  source 1..21: mol_type = other RNA
ttcctcggtatttattgtcta

SEQ ID NO: 1406 - RNA, 21 nt, synthetic construct
  modified_base 1: mod_base = OTHER; note = 2'-O-methyladenosine
  modified_base 2: mod_base = gm
  modified_base 3: mod_base = gm
  modified_base 4: mod_base = gm
  modified_base 5: mod_base = gm
  modified_base 6: mod_base = cm
  modified_base 7: mod_base = gm
  modified_base 8: mod_base = OTHER; note = 2'-O-methyladenosine
  modified_base 9: mod_base = OTHER; note = 2'-fluoroguanosine
  modified_base 10: mod_base = OTHER; note = 2'-fluoroguanosine
  modified_base 11: mod_base = OTHER; note = 2'-fluorouridine
  modified_base 12: mod_base = gm
  modified_base 13: mod_base = um
  modified_base 14: mod_base = cm
  modified_base 15: mod_base = gm
  modified_base 16: mod_base = um
  modified_base 17: mod_base = gm
  modified_base 18: mod_base = cm
  modified_base 19: mod_base = um
  modified_base 20: mod_base = um
  modified_base 21: mod_base = OTHER; note = 2'-O-methyladenosine
  source 1..21: mol_type = other RNA
aggggcgaggtgtcgtgctta

SEQ ID NO: 1407 - RNA, 21 nt, synthetic construct
  modified_base 1: mod_base = gm
  modified_base 2: mod_base = gm
  modified_base 3: mod_base = cm
  modified_base 4: mod_base = OTHER; note = 2'-O-methyladenosine
  modified_base 5: mod_base = gm
  modified_base 6: mod_base = OTHER; note = 2'-O-methyladenosine
  modified_base 7: mod_base = cm
  modified_base 8: mod_base = gm
  modified_base 9: mod_base = OTHER; note = 2'-fluorocytidine
  modified_base 10: mod_base = OTHER; note = 2'-fluorocytidine
  modified_base 11: mod_base = OTHER; note = 2'-fluorocytidine
  modified_base 12: mod_base = um
  modified_base 13: mod_base = um
  modified_base 14: mod_base = cm
  modified_base 15: mod_base = um
  modified_base 16: mod_base = OTHER; note = 2'-O-methyladenosine
  modified_base 17: mod_base = cm
  modified_base 18: mod_base = gm
  modified_base 19: mod_base = cm
  modified_base 20: mod_base = gm
  modified_base 21: mod_base = OTHER; note = 2'-O-methyladenosine
  source 1..21: mol_type = other RNA
ggcagacgcccttctacgcga

SEQ ID NO: 1408 - RNA, 21 nt, synthetic construct
  modified_base 1: mod_base = cm
  modified_base 2: mod_base = cm
  modified_base 3: mod_base = cm
  modified_base 4: mod_base = cm
  modified_base 5: mod_base = gm
  modified_base 6: mod_base = OTHER; note = 2'-O-methyladenosine
  modified_base 7: mod_base = cm
  modified_base 8: mod_base = OTHER; note = 2'-O-methyladenosine
  modified_base 9: mod_base = OTHER; note = 2'-fluorouridine
  modified_base 10: mod_base = OTHER; note = 2'-fluorouridine
  modified_base 11: mod_base = OTHER; note = 2'-fluorocytidine
  modified_base 12: mod_base = cm
  modified_base 13: mod_base = um
  modified_base 14: mod_base = cm
  modified_base 15: mod_base = gm
  modified_base 16: mod_base = gm
  modified_base 17: mod_base = um
  modified_base 18: mod_base = OTHER; note = 2'-O-methyladenosine
  modified_base 19: mod_base = um
  modified_base 20: mod_base = um
  modified_base 21: mod_base = OTHER; note = 2'-O-methyladenosine
  source 1..21: mol_type = other RNA
ccccgacattcctcggtatta

SEQ ID NO: 1409 - RNA, 21 nt, synthetic construct
  modified_base 1: mod_base = um
  modified_base 2: mod_base = um
  modified_base 3: mod_base = cm
  modified_base 4: mod_base = cm
  modified_base 5: mod_base = um
  modified_base 6: mod_base = cm
  modified_base 7: mod_base = gm
  modified_base 8: mod_base = gm
  modified_base 9: mod_base = OTHER; note = 2'-fluorouridine
  modified_base 10: mod_base = OTHER; note = 2'-fluoroadenosine
  modified_base 11: mod_base = OTHER; note = 2'-fluorouridine
  modified_base 12: mod_base = um
  modified_base 13: mod_base = um
  modified_base 14: mod_base = OTHER; note = 2'-O-methyladenosine
  modified_base 15: mod_base = um
  modified_base 16: mod_base = um
  modified_base 17: mod_base = gm
  modified_base 18: mod_base = um
  modified_base 19: mod_base = cm
  modified_base 20: mod_base = um
  modified_base 21: mod_base = OTHER; note = 2'-O-methyladenosine
  source 1..21: mol_type = other RNA
ttcctcggtatttattgtcta

SEQ ID NO: 1410 - RNA, 21 nt, synthetic construct
  modified_base 1: mod_base = gm
  modified_base 2: mod_base = cm
  modified_base 3: mod_base = OTHER; note = 2'-O-methyladenosine
  modified_base 4: mod_base = um
  modified_base 5: mod_base = um
  modified_base 6: mod_base = cm
  modified_base 7: mod_base = cm
  modified_base 8: mod_base = um
  modified_base 9: mod_base = OTHER; note = 2'-fluorocytidine
  modified_base 10: mod_base = OTHER; note = 2'-fluoroguanosine
  modified_base 11: mod_base = OTHER; note = 2'-fluoroguanosine
  modified_base 12: mod_base = um
  modified_base 13: mod_base = OTHER; note = 2'-O-methyladenosine
  modified_base 14: mod_base = um
  modified_base 15: mod_base = um
  modified_base 16: mod_base = um
  modified_base 17: mod_base = OTHER; note = 2'-O-methyladenosine
  modified_base 18: mod_base = um
  modified_base 19: mod_base = um
  modified_base 20: mod_base = gm
  modified_base 21: mod_base = um
  source 1..21: mol_type = other RNA
gcattcctcggtatttattgt

SEQ ID NO: 1411 - RNA, 21 nt, synthetic construct
  modified_base 1: mod_base = cm
  modified_base 2: mod_base = cm
  modified_base 3: mod_base = um
  modified_base 4: mod_base = gm
  modified_base 5: mod_base = gm
  modified_base 6: mod_base = um
  modified_base 7: mod_base = cm
  modified_base 8: mod_base = OTHER; note = 2'-O-methyladenosine
  modified_base 9: mod_base = OTHER; note = 2'-fluorouridine
  modified_base 10: mod_base = OTHER; note = 2'-fluoroguanosine
  modified_base 11: mod_base = OTHER; note = 2'-fluoroguanosine
  modified_base 12: mod_base = OTHER; note = 2'-O-methyladenosine
  modified_base 13: mod_base = gm
  modified_base 14: mod_base = um
  modified_base 15: mod_base = OTHER; note = 2'-O-methyladenosine
  modified_base 16: mod_base = um
  modified_base 17: mod_base = um
  modified_base 18: mod_base = OTHER; note = 2'-O-methyladenosine
  modified_base 19: mod_base = cm
  modified_base 20: mod_base = gm
  modified_base 21: mod_base = um
  source 1..21: mol_type = other RNA
cctggtcatggagtattacgt

SEQ ID NO: 1412 - RNA, 21 nt, synthetic construct
  modified_base 1: mod_base = gm
  modified_base 2: mod_base = um
  modified_base 3: mod_base = cm
  modified_base 4: mod_base = cm
  modified_base 5: mod_base = um
  modified_base 6: mod_base = cm
  modified_base 7: mod_base = gm
  modified_base 8: mod_base = gm
  modified_base 9: mod_base = OTHER; note = 2'-fluorouridine
  modified_base 10: mod_base = OTHER; note = 2'-fluoroadenosine
  modified_base 11: mod_base = OTHER; note = 2'-fluorouridine
  modified_base 12: mod_base = um
  modified_base 13: mod_base = um
  modified_base 14: mod_base = OTHER; note = 2'-O-methyladenosine
  modified_base 15: mod_base = um
  modified_base 16: mod_base = um
  modified_base 17: mod_base = gm
  modified_base 18: mod_base = um
  modified_base 19: mod_base = cm
  modified_base 20: mod_base = um
  modified_base 21: mod_base = OTHER; note = 2'-O-methyladenosine
  source 1..21: mol_type = other RNA
gtcctcggtatttattgtcta

SEQ ID NO: 1413 - RNA, 21 nt, synthetic construct
  modified_base 1: mod_base = um
  modified_base 2: mod_base = um
  modified_base 3: mod_base = cm
  modified_base 4: mod_base = cm
  modified_base 5: mod_base = um
  modified_base 6: mod_base = cm
  modified_base 7: mod_base = gm
  modified_base 8: mod_base = gm
  modified_base 9: mod_base = OTHER; note = 2'-fluorouridine
  modified_base 10: mod_base = OTHER; note = 2'-O-methyladenosine
  modified_base 11: mod_base = OTHER; note = 2'-fluorouridine
  modified_base 12: mod_base = um
  modified_base 13: mod_base = OTHER; note = 2'-fluorouridine
  modified_base 14: mod_base = OTHER; note = 2'-O-methyladenosine
  modified_base 15: mod_base = um
  modified_base 16: mod_base = um
  modified_base 17: mod_base = gm
  modified_base 18: mod_base = um
  modified_base 19: mod_base = cm
  modified_base 20: mod_base = um
  modified_base 21: mod_base = OTHER; note = 2'-O-methyladenosine
  source 1..21: mol_type = other RNA
ttcctcggtatttattgtcta

SEQ ID NO: 1414 - RNA, 21 nt, synthetic construct
  modified_base 1: mod_base = gm
  modified_base 2: mod_base = um
  modified_base 3: mod_base = cm
  modified_base 4: mod_base = cm
  modified_base 5: mod_base = um
  modified_base 6: mod_base = cm
  modified_base 7: mod_base = gm
  modified_base 8: mod_base = gm
  modified_base 9: mod_base = OTHER; note = 2'-fluorouridine
  modified_base 10: mod_base = OTHER; note = 2'-O-methyladenosine
  modified_base 11: mod_base = OTHER; note = 2'-fluorouridine
  modified_base 12: mod_base = um
  modified_base 13: mod_base = OTHER; note = 2'-fluorouridine
  modified_base 14: mod_base = OTHER; note = 2'-O-methyladenosine
  modified_base 15: mod_base = um
  modified_base 16: mod_base = um
  modified_base 17: mod_base = gm
  modified_base 18: mod_base = um
  modified_base 19: mod_base = cm
  modified_base 20: mod_base = um
  modified_base 21: mod_base = OTHER; note = 2'-O-methyladenosine
  source 1..21: mol_type = other RNA
gtcctcggtatttattgtcta

SEQ ID NO: 1415 - RNA, 21 nt, synthetic construct
  modified_base 1: mod_base = um
  modified_base 2: mod_base = um
  modified_base 3: mod_base = cm
  modified_base 4: mod_base = cm
  modified_base 5: mod_base = um
  modified_base 6: mod_base = cm
  modified_base 7: mod_base = gm
  modified_base 8: mod_base = gm
  modified_base 9: mod_base = OTHER; note = 2'-fluorouridine
  modified_base 10: mod_base = OTHER; note = 2'-O-methyladenosine
  modified_base 11: mod_base = OTHER; note = 2'-fluorouridine
  modified_base 12: mod_base = OTHER; note = 2'-fluorouridine
  modified_base 13: mod_base = um
  modified_base 14: mod_base = OTHER; note = 2'-O-methyladenosine
  modified_base 15: mod_base = um
  modified_base 16: mod_base = um
  modified_base 17: mod_base = gm
  modified_base 18: mod_base = um
  modified_base 19: mod_base = cm
  modified_base 20: mod_base = um
  modified_base 21: mod_base = OTHER; note = 2'-O-methyladenosine
  source 1..21: mol_type = other RNA
ttcctcggtatttattgtcta

SEQ ID NO: 1416 - RNA, 21 nt, synthetic construct
  modified_base 1: mod_base = OTHER; note = 2'-O-methyladenosine
  modified_base 2: mod_base = cm
  modified_base 3: mod_base = OTHER; note = 2'-O-methyladenosine
  modified_base 4: mod_base = OTHER; note = 2'-O-methyladenosine
  modified_base 5: mod_base = gm
  modified_base 6: mod_base = um
  modified_base 7: mod_base = gm
  modified_base 8: mod_base = gm
  modified_base 9: mod_base = OTHER; note = 2'-fluoroguanosine
  modified_base 10: mod_base = OTHER; note = 2'-fluoroadenosine
  modified_base 11: mod_base = OTHER; note = 2'-fluorocytidine
  modified_base 12: mod_base = OTHER; note = 2'-O-methyladenosine
  modified_base 13: mod_base = um
  modified_base 14: mod_base = gm
  modified_base 15: mod_base = cm
  modified_base 16: mod_base = um
  modified_base 17: mod_base = OTHER; note = 2'-O-methylinosine
  modified_base 18: mod_base = OTHER; note = 2'-O-methyladenosine
  modified_base 19: mod_base = OTHER; note = 2'-O-methyladenosine
  modified_base 20: mod_base = gm
  modified_base 21: mod_base = OTHER; note = 2'-O-methyladenosine
  source 1..21: mol_type = other RNA
acaagtgggacatgctnaaga

SEQ ID NO: 1417 - RNA, 21 nt, synthetic construct
  modified_base 1: mod_base = cm
  modified_base 2: mod_base = OTHER; note = 2'-O-methyladenosine
  modified_base 3: mod_base = OTHER; note = 2'-O-methyladenosine
  modified_base 4: mod_base = gm
  modified_base 5: mod_base = um
  modified_base 6: mod_base = gm
  modified_base 7: mod_base = gm
  modified_base 8: mod_base = gm
  modified_base 9: mod_base = OTHER; note = 2'-fluoroadenosine
  modified_base 10: mod_base = OTHER; note = 2'-fluorocytidine
  modified_base 11: mod_base = OTHER; note = 2'-fluoroadenosine
  modified_base 12: mod_base = um
  modified_base 13: mod_base = gm
  modified_base 14: mod_base = cm
  modified_base 15: mod_base = um
  modified_base 16: mod_base = OTHER; note = 2'-O-methylinosine
  modified_base 17: mod_base = OTHER; note = 2'-O-methyladenosine
  modified_base 18: mod_base = OTHER; note = 2'-O-methyladenosine
  modified_base 19: mod_base = gm
  modified_base 20: mod_base = OTHER; note = 2'-O-methyladenosine
  modified_base 21: mod_base = OTHER; note = 2'-O-methyladenosine
  source 1..21: mol_type = other RNA
caagtgggacatgctnaagaa

SEQ ID NO: 1418 - RNA, 21 nt, synthetic construct
  modified_base 1: mod_base = cm
  modified_base 2: mod_base = um
  modified_base 3: mod_base = um
  modified_base 4: mod_base = cm
  modified_base 5: mod_base = cm
  modified_base 6: mod_base = OTHER; note = 2'-O-methyladenosine
  modified_base 7: mod_base = gm
  modified_base 8: mod_base = gm
  modified_base 9: mod_base = OTHER; note = 2'-fluoroadenosine
  modified_base 10: mod_base = OTHER; note = 2'-fluorouridine
  modified_base 11: mod_base = OTHER; note = 2'-fluoroguanosine
  modified_base 12: mod_base = OTHER; note = 2'-O-methyladenosine
  modified_base 13: mod_base = gm
  modified_base 14: mod_base = OTHER; note = 2'-O-methyladenosine
  modified_base 15: mod_base = OTHER; note = 2'-O-methyladenosine
  modified_base 16: mod_base = cm
  modified_base 17: mod_base = um
  modified_base 18: mod_base = OTHER; note = 2'-O-methyladenosine
  modified_base 19: mod_base = cm
  modified_base 20: mod_base = um
  modified_base 21: mod_base = um
  source 1..21: mol_type = other RNA
cttccaggatgagaactactt

SEQ ID NO: 1419 - RNA, 21 nt, synthetic construct
  modified_base 1: mod_base = cm
  modified_base 2: mod_base = um
  modified_base 3: mod_base = um
  modified_base 4: mod_base = cm
  modified_base 5: mod_base = cm
  modified_base 6: mod_base = OTHER; note = 2'-O-methyladenosine
  modified_base 7: mod_base = gm
  modified_base 8: mod_base = gm
  modified_base 9: mod_base = OTHER; note = 2'-fluoroadenosine
  modified_base 10: mod_base = OTHER; note = 2'-fluorouridine
  modified_base 11: mod_base = OTHER; note = 2'-fluoroguanosine
  modified_base 12: mod_base = OTHER; note = 2'-O-methyladenosine
  modified_base 13: mod_base = gm
  modified_base 14: mod_base = OTHER; note = 2'-O-methyladenosine
  modified_base 15: mod_base = OTHER; note = 2'-O-methyladenosine
  modified_base 16: mod_base = cm
  modified_base 17: mod_base = um
  modified_base 18: mod_base = OTHER; note = 2'-O-methyladenosine
  modified_base 19: mod_base = um
  modified_base 20: mod_base = cm
  modified_base 21: mod_base = um
  source 1..21: mol_type = other RNA
cttccaggatgagaactatct

SEQ ID NO: 1420 - RNA, 21 nt, synthetic construct
  modified_base 1: mod_base = um
  modified_base 2: mod_base = cm
  modified_base 3: mod_base = cm
  modified_base 4: mod_base = OTHER; note = 2'-O-methyladenosine
  modified_base 5: mod_base = gm
  modified_base 6: mod_base = gm
  modified_base 7: mod_base = OTHER; note = 2'-O-methyladenosine
  modified_base 8: mod_base = um
  modified_base 9: mod_base = OTHER; note = 2'-fluoroguanosine
  modified_base 10: mod_base = OTHER; note = 2'-fluoroadenosine
  modified_base 11: mod_base = OTHER; note = 2'-fluoroguanosine
  modified_base 12: mod_base = OTHER; note = 2'-O-methyladenosine
  modified_base 13: mod_base = OTHER; note = 2'-O-methyladenosine
  modified_base 14: mod_base = cm
  modified_base 15: mod_base = um
  modified_base 16: mod_base = OTHER; note = 2'-O-methyladenosine
  modified_base 17: mod_base = cm
  modified_base 18: mod_base = cm
  modified_base 19: mod_base = um
  modified_base 20: mod_base = OTHER; note = 2'-O-methylinosine
  modified_base 21: mod_base = um
  source 1..21: mol_type = other RNA
tccaggatgagaactacctnt

SEQ ID NO: 1421 - RNA, 21 nt, synthetic construct
  modified_base 1: mod_base = um
  modified_base 2: mod_base = cm
  modified_base 3: mod_base = cm
  modified_base 4: mod_base = OTHER; note = 2'-O-methyladenosine
  modified_base 5: mod_base = gm
  modified_base 6: mod_base = gm
  modified_base 7: mod_base = OTHER; note = 2'-O-methyladenosine
  modified_base 8: mod_base = um
  modified_base 9: mod_base = OTHER; note = 2'-fluoroguanosine
  modified_base 10: mod_base = OTHER; note = 2'-fluoroadenosine
  modified_base 11: mod_base = OTHER; note = 2'-fluoroguanosine
  modified_base 12: mod_base = OTHER; note = 2'-O-methyladenosine
  modified_base 13: mod_base = OTHER; note = 2'-O-methyladenosine
  modified_base 14: mod_base = cm
  modified_base 15: mod_base = um
  modified_base 16: mod_base = OTHER; note = 2'-O-methyladenosine
  modified_base 17: mod_base = cm
  modified_base 18: mod_base = um
  modified_base 19: mod_base = um
  modified_base 20: mod_base = gm
  modified_base 21: mod_base = um
  source 1..21: mol_type = other RNA
tccaggatgagaactacttgt

SEQ ID NO: 1422 - RNA, 21 nt, synthetic construct
  modified_base 1: mod_base = OTHER; note = 2'-O-methyladenosine
  modified_base 2: mod_base = gm
  modified_base 3: mod_base = gm
  modified_base 4: mod_base = OTHER; note = 2'-O-methyladenosine
  modified_base 5: mod_base = um
  modified_base 6: mod_base = gm
  modified_base 7: mod_base = OTHER; note = 2'-O-methyladenosine
  modified_base 8: mod_base = gm
  modified_base 9: mod_base = OTHER; note = 2'-fluoroadenosine
  modified_base 10: mod_base = OTHER; note = 2'-fluoroadenosine
  modified_base 11: mod_base = OTHER; note = 2'-fluorocytidine
  modified_base 12: mod_base = um
  modified_base 13: mod_base = OTHER; note = 2'-O-methyladenosine
  modified_base 14: mod_base = cm
  modified_base 15: mod_base = cm
  modified_base 16: mod_base = um
  modified_base 17: mod_base = OTHER; note = 2'-O-methylinosine
  modified_base 18: mod_base = um
  modified_base 19: mod_base = OTHER; note = 2'-O-methyladenosine
  modified_base 20: mod_base = cm
  modified_base 21: mod_base = OTHER; note = 2'-O-methyladenosine
  source 1..21: mol_type = other RNA
aggatgagaactacctntaca

SEQ ID NO: 1423 - RNA, 21 nt, synthetic construct
  modified_base 1: mod_base = cm
  modified_base 2: mod_base = um
  modified_base 3: mod_base = OTHER; note = 2'-O-methyladenosine
  modified_base 4: mod_base = cm
  modified_base 5: mod_base = cm
  modified_base 6: mod_base = um
  modified_base 7: mod_base = gm
  modified_base 8: mod_base = um
  modified_base 9: mod_base = OTHER; note = 2'-fluoroadenosine
  modified_base 10: mod_base = OTHER; note = 2'-fluorocytidine
  modified_base 11: mod_base = OTHER; note = 2'-fluorocytidine
  modified_base 12: mod_base = um
  modified_base 13: mod_base = gm
  modified_base 14: mod_base = gm
  modified_base 15: mod_base = um
  modified_base 16: mod_base = cm
  modified_base 17: mod_base = OTHER; note = 2'-O-methyladenosine
  modified_base 18: mod_base = um
  modified_base 19: mod_base = OTHER; note = 2'-O-methylinosine
  modified_base 20: mod_base = gm
  modified_base 21: mod_base = OTHER; note = 2'-O-methyladenosine
  source 1..21: mol_type = other RNA
ctacctgtacctggtcatnga

SEQ ID NO: 1424 - RNA, 21 nt, synthetic construct
  modified_base 1: mod_base = cm
  modified_base 2: mod_base = um
  modified_base 3: mod_base = OTHER; note = 2'-O-methyladenosine
  modified_base 4: mod_base = cm
  modified_base 5: mod_base = cm
  modified_base 6: mod_base = um
  modified_base 7: mod_base = gm
  modified_base 8: mod_base = um
  modified_base 9: mod_base = OTHER; note = 2'-fluoroadenosine
  modified_base 10: mod_base = OTHER; note = 2'-fluorocytidine
  modified_base 11: mod_base = OTHER; note = 2'-fluorocytidine
  modified_base 12: mod_base = um
  modified_base 13: mod_base = gm
  modified_base 14: mod_base = gm
  modified_base 15: mod_base = um
  modified_base 16: mod_base = um
  modified_base 17: mod_base = OTHER; note = 2'-O-methyladenosine
  modified_base 18: mod_base = um
  modified_base 19: mod_base = gm
  modified_base 20: mod_base = gm
  modified_base 21: mod_base = OTHER; note = 2'-O-methyladenosine
  source 1..21: mol_type = other RNA
ctacctgtacctggttatgga

SEQ ID NO: 1425 - RNA, 21 nt, synthetic construct
  modified_base 1: mod_base = OTHER; note = 2'-O-methyladenosine
  modified_base 2: mod_base = cm
  modified_base 3: mod_base = OTHER; note = 2'-O-methyladenosine
  modified_base 4: mod_base = cm
  modified_base 5: mod_base = um
  modified_base 6: mod_base = gm
  modified_base 7: mod_base = cm
  modified_base 8: mod_base = um
  modified_base 9: mod_base = OTHER; note = 2'-fluoroguanosine
  modified_base 10: mod_base = OTHER; note = 2'-fluoroadenosine
  modified_base 11: mod_base = OTHER; note = 2'-fluoroguanosine
  modified_base 12: mod_base = cm
  modified_base 13: mod_base = OTHER; note = 2'-O-methyladenosine
  modified_base 14: mod_base = OTHER; note = 2'-O-methyladenosine
  modified_base 15: mod_base = gm
  modified_base 16: mod_base = um
  modified_base 17: mod_base = um
  modified_base 18: mod_base = um
  modified_base 19: mod_base = OTHER; note = 2'-O-methylinosine
  modified_base 20: mod_base = gm
  modified_base 21: mod_base = OTHER; note = 2'-O-methyladenosine
  source 1..21: mol_type = other RNA
acactgctgagcaagtttnga

SEQ ID NO: 1426 - RNA, 22 nt, synthetic construct
  modified_base 1: mod_base = um
  modified_base 2: mod_base = um
  modified_base 3: mod_base = cm
  modified_base 4: mod_base = cm
  modified_base 5: mod_base = um
  modified_base 6: mod_base = cm
  modified_base 7: mod_base = gm
  modified_base 8: mod_base = gm
  modified_base 9: mod_base = OTHER; note = 2'-fluorouridine
  modified_base 10: mod_base = OTHER; note = 2'-O-methyladenosine
  modified_base 11: mod_base = OTHER; note = 2'-fluorouridine
  modified_base 12: mod_base = um
  modified_base 13: mod_base = OTHER; note = 2'-fluorouridine
  modified_base 14: mod_base = OTHER; note = 2'-O-methyladenosine
  modified_base 15: mod_base = um
  modified_base 16: mod_base = um
  modified_base 17: mod_base = gm
  modified_base 18: mod_base = um
  modified_base 19: mod_base = cm
  modified_base 20: mod_base = um
  modified_base 21: mod_base = OTHER; note = 2'-O-methyladenosine
  modified_base 22: mod_base = OTHER; note = 2'-deoxythymidine
  source 1..22: mol_type = other RNA
ttcctcggtatttattgtctat

SEQ ID NO: 1427 - RNA, 21 nt, synthetic construct
  modified_base 1: mod_base = cm
  modified_base 2: mod_base = cm
  modified_base 3: mod_base = um
  modified_base 4: mod_base = cm
  modified_base 5: mod_base = gm
  modified_base 6: mod_base = gm
  modified_base 7: mod_base = um
  modified_base 8: mod_base = OTHER; note = 2'-O-methyladenosine
  modified_base 9: mod_base = OTHER; note = 2'-fluorouridine
  modified_base 10: mod_base = OTHER; note = 2'-fluorouridine
  modified_base 11: mod_base = OTHER; note = 2'-fluorouridine
  modified_base 12: mod_base = OTHER; note = 2'-O-methyladenosine
  modified_base 13: mod_base = um
  modified_base 14: mod_base = um
  modified_base 15: mod_base = gm
  modified_base 16: mod_base = um
  modified_base 17: mod_base = um
  modified_base 18: mod_base = um
  modified_base 19: mod_base = gm
  modified_base 20: mod_base = um
  modified_base 21: mod_base = OTHER; note = 2'-O-methyladenosine
  source 1..21: mol_type = other RNA
cctcggtatttattgtttgta

SEQ ID NO: 1428 - RNA, 21 nt, synthetic construct
  modified_base 1: mod_base = cm
  modified_base 2: mod_base = cm
  modified_base 3: mod_base = um
  modified_base 4: mod_base = cm
  modified_base 5: mod_base = gm
  modified_base 6: mod_base = gm
  modified_base 7: mod_base = um
  modified_base 8: mod_base = OTHER; note = 2'-O-methyladenosine
  modified_base 9: mod_base = OTHER; note = 2'-fluorouridine
  modified_base 10: mod_base = OTHER; note = 2'-fluorouridine
  modified_base 11: mod_base = OTHER; note = 2'-fluorouridine
  modified_base 12: mod_base = OTHER; note = 2'-O-methyladenosine
  modified_base 13: mod_base = um
  modified_base 14: mod_base = um
  modified_base 15: mod_base = gm
  modified_base 16: mod_base = um
  modified_base 17: mod_base = cm
  modified_base 18: mod_base = um
  modified_base 19: mod_base = gm
  modified_base 20: mod_base = um
  modified_base 21: mod_base = OTHER; note = 2'-O-methyladenosine
  source 1..21: mol_type = other RNA
cctcggtatttattgtctgta

SEQ ID NO: 1429 - RNA, 21 nt, synthetic construct
  modified_base 1: mod_base = cm
  modified_base 2: mod_base = cm
  modified_base 3: mod_base = um
  modified_base 4: mod_base = cm
  modified_base 5: mod_base = gm
  modified_base 6: mod_base = gm
  modified_base 7: mod_base = um
  modified_base 8: mod_base = OTHER; note = 2'-O-methyladenosine
  modified_base 9: mod_base = OTHER; note = 2'-fluorouridine
  modified_base 10: mod_base = OTHER; note = 2'-fluorouridine
  modified_base 11: mod_base = OTHER; note = 2'-fluorouridine
  modified_base 12: mod_base = OTHER; note = 2'-O-methyladenosine
  modified_base 13: mod_base = um
  modified_base 14: mod_base = um
  modified_base 15: mod_base = gm
  modified_base 16: mod_base = um
  modified_base 17: mod_base = cm
  modified_base 18: mod_base = um
  modified_base 19: mod_base = OTHER; note = 2'-O-methylinosine
  modified_base 20: mod_base = um
  modified_base 21: mod_base = OTHER; note = 2'-O-methyladenosine
  source 1..21: mol_type = other RNA
cctcggtatttattgtctnta

SEQ ID NO: 1430 - RNA, 21 nt, synthetic construct
  modified_base 1: mod_base = gm
  modified_base 2: mod_base = OTHER; note = 2'-O-methyladenosine
  modified_base 3: mod_base = cm
  modified_base 4: mod_base = cm
  modified_base 5: mod_base = cm
  modified_base 6: mod_base = um
  modified_base 7: mod_base = OTHER; note = 2'-O-methyladenosine
  modified_base 8: mod_base = gm
  modified_base 9: mod_base = OTHER; note = 2'-fluoroadenosine
  modified_base 10: mod_base = OTHER; note = 2'-fluoroadenosine
  modified_base 11: mod_base = OTHER; note = 2'-fluorocytidine
  modified_base 12: mod_base = um
  modified_base 13: mod_base = gm
  modified_base 14: mod_base = um
  modified_base 15: mod_base = cm
  modified_base 16: mod_base = um
  modified_base 17: mod_base = um
  modified_base 18: mod_base = cm
  modified_base 19: mod_base = OTHER; note = 2'-O-methylinosine
  modified_base 20: mod_base = OTHER; note = 2'-O-methyladenosine
  modified_base 21: mod_base = OTHER; note = 2'-O-methyladenosine
  source 1..21: mol_type = other RNA
gaccctagaactgtcttcnaa

SEQ ID NO: 1431 - RNA, 21 nt, synthetic construct
  modified_base 1: mod_base = gm
  modified_base 2: mod_base = OTHER; note = 2'-O-methyladenosine
  modified_base 3: mod_base = OTHER; note = 2'-O-methyladenosine
  modified_base 4: mod_base = cm
  modified_base 5: mod_base = cm
  modified_base 6: mod_base = cm
  modified_base 7: mod_base = um
  modified_base 8: mod_base = OTHER; note = 2'-O-methyladenosine
  modified_base 9: mod_base = OTHER; note = 2'-fluoroguanosine
  modified_base 10: mod_base = OTHER; note = 2'-fluoroadenosine
  modified_base 11: mod_base = OTHER; note = 2'-fluoroadenosine
  modified_base 12: mod_base = cm
  modified_base 13: mod_base = um
  modified_base 14: mod_base = gm
  modified_base 15: mod_base = um
  modified_base 16: mod_base = cm
  modified_base 17: mod_base = um
  modified_base 18: mod_base = um
  modified_base 19: mod_base = cm
  modified_base 20: mod_base = OTHER; note = 2'-O-methylinosine
  modified_base 21: mod_base = OTHER; note = 2'-O-methyladenosine
  source 1..21: mol_type = other RNA
gaaccctagaactgtcttcna

SEQ ID NO: 1432 - RNA, 19 nt, synthetic construct
  modified_base 1: mod_base = cm
  modified_base 1^2: mod_base = OTHER; note = phosphorothioate linkage
  modified_base 2: mod_base = cm
  modified_base 2^3: mod_base = OTHER; note = phosphorothioate linkage
  modified_base 3: mod_base = cm
  modified_base 4: mod_base = um
  modified_base 5: mod_base = OTHER; note = 2'-O-methyladenosine
  modified_base 6: mod_base = gm
  modified_base 7: mod_base = OTHER; note = 2'-fluoroadenosine
  modified_base 8: mod_base = OTHER; note = 2'-fluoroadenosine
  modified_base 9: mod_base = OTHER; note = 2'-fluorocytidine
  modified_base 10: mod_base = um
  modified_base 11: mod_base = gm
  modified_base 12: mod_base = um
  modified_base 13: mod_base = cm
  modified_base 14: mod_base = um
  modified_base 15: mod_base = um
  modified_base 16: mod_base = cm
  modified_base 17: mod_base = gm
  modified_base 17^18: mod_base = OTHER; note = phosphorothioate linkage
  modified_base 18: mod_base = OTHER; note = 2'-O-methyladenosine
  modified_base 18^19: mod_base = OTHER; note = phosphorothioate linkage
  modified_base 19: mod_base = OTHER; note = 2'-O-methyladenosine
  source 1..19: mol_type = other RNA
ccctagaactgtcttcgaa

SEQ ID NO: 1433 - RNA, 21 nt, synthetic construct
  modified_base 1: mod_base = cm
  modified_base 2: mod_base = OTHER; note = 2'-O-methyladenosine
  modified_base 3: mod_base = cm
  modified_base 4: mod_base = cm
  modified_base 5: mod_base = gm
  modified_base 6: mod_base = OTHER; note = 2'-O-methyladenosine
  modified_base 7: mod_base = cm
  modified_base 8: mod_base = OTHER; note = 2'-O-methyladenosine
  modified_base 9: mod_base = OTHER; note = 2'-fluorocytidine
  modified_base 10: mod_base = OTHER; note = 2'-O-methyladenosine
  modified_base 11: mod_base = OTHER; note = 2'-fluorouridine
  modified_base 12: mod_base = gm
  modified_base 13: mod_base = OTHER; note = 2'-fluorocytidine
  modified_base 14: mod_base = OTHER; note = 2'-O-methyladenosine
  modified_base 15: mod_base = OTHER; note = 2'-O-methyladenosine
  modified_base 16: mod_base = cm
  modified_base 17: mod_base = um
  modified_base 18: mod_base = um
  modified_base 19: mod_base = cm
  modified_base 20: mod_base = OTHER; note = 2'-O-methylinosine
  modified_base 21: mod_base = OTHER; note = 2'-O-methyladenosine
  source 1..21: mol_type = other RNA
caccgacacatgcaacttcna

SEQ ID NO: 1434 - RNA, 21 nt, synthetic construct
  modified_base 1: mod_base = um
  modified_base 2: mod_base = gm
  modified_base 3: mod_base = gm
  modified_base 4: mod_base = cm
  modified_base 5: mod_base = OTHER; note = 2'-O-methyladenosine
  modified_base 6: mod_base = OTHER; note = 2'-O-methyladenosine
  modified_base 7: mod_base = gm
  modified_base 8: mod_base = OTHER; note = 2'-O-methyladenosine
  modified_base 9: mod_base = OTHER; note = 2'-fluorouridine
  modified_base 10: mod_base = cm
  modified_base 11: mod_base = OTHER; note = 2'-fluoroguanosine
  modified_base 12: mod_base = um
  modified_base 13: mod_base = cm
  modified_base 14: mod_base = cm
  modified_base 15: mod_base = OTHER; note = 2'-O-methyladenosine
  modified_base 16: mod_base = cm
  modified_base 17: mod_base = um
  modified_base 18: mod_base = OTHER; note = 2'-O-methyladenosine
  modified_base 19: mod_base = cm
  modified_base 20: mod_base = OTHER; note = 2'-O-methyladenosine
  modified_base 21: mod_base = OTHER; note = 2'-O-methyladenosine
  source 1..21: mol_type = other RNA
tggcaagatcgtccactacaa

SEQ ID NO: 1435 - RNA, 21 nt, synthetic construct
  modified_base 1: mod_base = cm
  modified_base 2: mod_base = cm
  modified_base 3: mod_base = um
  modified_base 4: mod_base = gm
  modified_base 5: mod_base = gm
  modified_base 6: mod_base = um
  modified_base 7: mod_base = cm
  modified_base 8: mod_base = OTHER; note = 2'-O-methyladenosine
  modified_base 9: mod_base = OTHER; note = 2'-fluorouridine
  modified_base 10: mod_base = gm
  modified_base 11: mod_base = OTHER; note = 2'-fluoroguanosine
  modified_base 12: mod_base = OTHER; note = 2'-fluoroadenosine
  modified_base 13: mod_base = gm
  modified_base 14: mod_base = um
  modified_base 15: mod_base = OTHER; note = 2'-O-methyladenosine
  modified_base 16: mod_base = um
  modified_base 17: mod_base = um
  modified_base 18: mod_base = OTHER; note = 2'-O-methyladenosine
  modified_base 19: mod_base = cm
  modified_base 20: mod_base = gm
  modified_base 21: mod_base = OTHER; note = 2'-O-methyladenosine
  source 1..21: mol_type = other RNA
cctggtcatggagtattacga

SEQ ID NO: 1436 - RNA, 21 nt, synthetic construct
  modified_base 1: mod_base = cm
  modified_base 2: mod_base = cm
  modified_base 3: mod_base = um
  modified_base 4: mod_base = cm
  modified_base 5: mod_base = gm
  modified_base 6: mod_base = gm
  modified_base 7: mod_base = um
  modified_base 8: mod_base = OTHER; note = 2'-O-methyladenosine
  modified_base 9: mod_base = OTHER; note = 2'-fluorouridine
  modified_base 10: mod_base = um
  modified_base 11: mod_base = OTHER; note = 2'-fluorouridine
  modified_base 12: mod_base = OTHER; note = 2'-O-methyladenosine
  modified_base 13: mod_base = OTHER; note = 2'-fluorouridine
  modified_base 14: mod_base = um
  modified_base 15: mod_base = gm
  modified_base 16: mod_base = um
  modified_base 17: mod_base = cm
  modified_base 18: mod_base = um
  modified_base 19: mod_base = gm
  modified_base 20: mod_base = um
  modified_base 21: mod_base = OTHER; note = 2'-O-methyladenosine
  source 1..21: mol_type = other RNA
cctcggtatttattgtctgta

SEQ ID NO: 1437 - RNA, 21 nt, synthetic construct
  modified_base 1: mod_base = cm
  modified_base 2: mod_base = cm
  modified_base 3: mod_base = um
  modified_base 4: mod_base = cm
  modified_base 5: mod_base = gm
  modified_base 6: mod_base = gm
  modified_base 7: mod_base = um
  modified_base 8: mod_base = OTHER; note = 2'-O-methyladenosine
  modified_base 9: mod_base = OTHER; note = 2'-fluorouridine
  modified_base 10: mod_base = um
  modified_base 11: mod_base = OTHER; note = 2'-fluorouridine
  modified_base 12: mod_base = OTHER; note = 2'-fluoroadenosine
  modified_base 13: mod_base = um
  modified_base 14: mod_base = um
  modified_base 15: mod_base = gm
  modified_base 16: mod_base = um
  modified_base 17: mod_base = cm
  modified_base 18: mod_base = um
  modified_base 19: mod_base = gm
  modified_base 20: mod_base = um
  modified_base 21: mod_base = OTHER; note = 2'-O-methyladenosine
  source 1..21: mol_type = other RNA
cctcggtatttattgtctgta

SEQ ID NO: 1438 - RNA, 21 nt, synthetic construct
  modified_base 1: mod_base = um
  modified_base 2: mod_base = um
  modified_base 3: mod_base = cm
  modified_base 4: mod_base = cm
  modified_base 5: mod_base = um
  modified_base 6: mod_base = cm
  modified_base 7: mod_base = gm
  modified_base 8: mod_base = gm
  modified_base 9: mod_base = OTHER; note = 2'-fluorouridine
  modified_base 10: mod_base = OTHER; note = 2'-O-methyladenosine
  modified_base 11: mod_base = OTHER; note = 2'-fluorouridine
  modified_base 12: mod_base = OTHER; note = 2'-fluorouridine
  modified_base 13: mod_base = um
  modified_base 14: mod_base = OTHER; note = 2'-O-methyladenosine
  modified_base 15: mod_base = um
  modified_base 16: mod_base = um
  modified_base 17: mod_base = gm
  modified_base 18: mod_base = um
  modified_base 19: mod_base = cm
  modified_base 20: mod_base = um
  modified_base 21: mod_base = OTHER; note = 2'-O-methyladenosine
  source 1..21: mol_type = other RNA
ttcctcggtatttattgtcta

SEQ ID NO: 1439 - RNA, 21 nt, synthetic construct
  modified_base 1: mod_base = cm
  modified_base 2: mod_base = cm
  modified_base 3: mod_base = um
  modified_base 4: mod_base = gm
  modified_base 5: mod_base = gm
  modified_base 6: mod_base = um
  modified_base 7: mod_base = cm
  modified_base 8: mod_base = OTHER; note = 2'-O-methyladenosine
  modified_base 9: mod_base = OTHER; note = 2'-fluorouridine
  modified_base 10: mod_base = gm
  modified_base 11: mod_base = OTHER; note = 2'-fluoroguanosine
  modified_base 12: mod_base = OTHER; note = 2'-fluoroadenosine
  modified_base 13: mod_base = gm
  modified_base 14: mod_base = um
  modified_base 15: mod_base = OTHER; note = 2'-O-methyladenosine
  modified_base 16: mod_base = um
  modified_base 17: mod_base = um
  modified_base 18: mod_base = OTHER; note = 2'-O-methyladenosine
  modified_base 19: mod_base = cm
  modified_base 20: mod_base = gm
  modified_base 21: mod_base = OTHER; note = 2'-O-methyladenosine
  source 1..21: mol_type = other RNA
cctggtcatggagtattacga

SEQ ID NO: 1440 - RNA, 22 nt, synthetic construct
  modified_base 1: mod_base = cm
  modified_base 2: mod_base = cm
  modified_base 3: mod_base = um
  modified_base 4: mod_base = gm
  modified_base 5: mod_base = gm
  modified_base 6: mod_base = gm
  modified_base 7: mod_base = um
  modified_base 8: mod_base = cm
  modified_base 9: mod_base = OTHER; note = 2'-O-methyladenosine
  modified_base 10: mod_base = OTHER; note = 2'-fluorouridine
  modified_base 11: mod_base = gm
  modified_base 12: mod_base = OTHER; note = 2'-fluoroguanosine
  modified_base 13: mod_base = OTHER; note = 2'-fluoroadenosine
  modified_base 14: mod_base = gm
  modified_base 15: mod_base = um
  modified_base 16: mod_base = OTHER; note = 2'-O-methyladenosine
  modified_base 17: mod_base = um
  modified_base 18: mod_base = um
  modified_base 19: mod_base = OTHER; note = 2'-O-methyladenosine
  modified_base 20: mod_base = cm
  modified_base 21: mod_base = gm
  modified_base 22: mod_base = OTHER; note = 2'-O-methyladenosine
  source 1..22: mol_type = other RNA
cctgggtcatggagtattacga

SEQ ID NO: 1441 - RNA, 20 nt, synthetic construct
  modified_base 1: mod_base = cm
  modified_base 2: mod_base = um
  modified_base 3: mod_base = gm
  modified_base 4: mod_base = gm
  modified_base 5: mod_base = um
  modified_base 6: mod_base = cm
  modified_base 7: mod_base = OTHER; note = 2'-O-methyladenosine
  modified_base 8: mod_base = OTHER; note = 2'-fluorouridine
  modified_base 9: mod_base = gm
  modified_base 10: mod_base = OTHER; note = 2'-fluoroguanosine
  modified_base 11: mod_base = OTHER; note = 2'-fluoroadenosine
  modified_base 12: mod_base = gm
  modified_base 13: mod_base = um
  modified_base 14: mod_base = OTHER; note = 2'-O-methyladenosine
  modified_base 15: mod_base = um
  modified_base 16: mod_base = um
  modified_base 17: mod_base = OTHER; note = 2'-O-methyladenosine
  modified_base 18: mod_base = cm
  modified_base 19: mod_base = gm
  modified_base 20: mod_base = OTHER; note = 2'-O-methyladenosine
  source 1..20: mol_type = other RNA
ctggtcatggagtattacga

SEQ ID NO: 1442 - RNA, 21 nt, synthetic construct
  modified_base 1: mod_base = cm
  modified_base 2: mod_base = cm
  modified_base 3: mod_base = um
  modified_base 4: mod_base = gm
  modified_base 5: mod_base = gm
  modified_base 6: mod_base = um
  modified_base 7: mod_base = cm
  modified_base 8: mod_base = OTHER; note = 2'-O-methyladenosine
  modified_base 9: mod_base = OTHER; note = 2'-fluorouridine
  modified_base 10: mod_base = gm
  modified_base 11: mod_base = OTHER; note = 2'-fluoroguanosine
  modified_base 12: mod_base = OTHER; note = 2'-fluoroadenosine
  modified_base 13: mod_base = gm
  modified_base 14: mod_base = um
  modified_base 15: mod_base = OTHER; note = 2'-O-methyladenosine
  modified_base 16: mod_base = um
  modified_base 17: mod_base = um
  modified_base 18: mod_base = OTHER; note = 2'-O-methyladenosine
  modified_base 19: mod_base = cm
  modified_base 20: mod_base = gm
  modified_base 21: mod_base = OTHER; note = 2'-O-methyladenosine
  source 1..21: mol_type = other RNA
cctggtcatggagtattacga

SEQ ID NO: 1443 - RNA, 21 nt, synthetic construct
  source 1..21: mol_type = other RNA
tccacttcagctgtttcatcc

SEQ ID NO: 1444 - RNA, 21 nt, synthetic construct
  source 1..21: mol_type = other RNA
tacagttctagggttcaggga

SEQ ID NO: 1445 - RNA, 21 nt, synthetic construct
  source 1..21: mol_type = other RNA
tcgaagacagttctagggttc

SEQ ID NO: 1446 - RNA, 21 nt, synthetic construct
  source 1..21: mol_type = other RNA
ttcgaagacagttctagggtc

SEQ ID NO: 1447 - RNA, 21 nt, synthetic construct
  source 1..21: mol_type = other RNA
agtcgaagacagttctagggt

SEQ ID NO: 1448 - RNA, 21 nt, synthetic construct
  source 1..21: mol_type = other RNA
tagtcgaagacagttctaggg

SEQ ID NO: 1449 - RNA, 21 nt, synthetic construct
  source 1..21: mol_type = other RNA
agcaaatttcccgagtaagca

SEQ ID NO: 1450 - RNA, 21 nt, synthetic construct
  source 1..21: mol_type = other RNA
ttggcaaaagcaaatttcccg

SEQ ID NO: 1451 - RNA, 21 nt, synthetic construct
  source 1..21: mol_type = other RNA
atccaaaacgtggattggggt

SEQ ID NO: 1452 - RNA, 21 nt, synthetic construct
  source 1..21: mol_type = other RNA
tcatccaaaacgtggattggg

SEQ ID NO: 1453 - RNA, 21 nt, synthetic construct
  source 1..21: mol_type = other RNA
tcattcaccaacacgtccctc

SEQ ID NO: 1454 - RNA, 21 nt, synthetic construct
  source 1..21: mol_type = other RNA
aggtacaggtagttctcatcc

SEQ ID NO: 1455 - RNA, 21 nt, synthetic construct
  source 1..21: mol_type = other RNA
acgtaatactccatgaccagg

SEQ ID NO: 1456 - RNA, 21 nt, synthetic construct
  source 1..21: mol_type = other RNA
atgttgtcgggtttgatgtcc

SEQ ID NO: 1457 - RNA, 21 nt, synthetic construct
  source 1..21: mol_type = other RNA
ttgtagtggacgatcttgcca

SEQ ID NO: 1458 - RNA, 21 nt, synthetic construct
  source 1..21: mol_type = other RNA
tcgaaatccggtgtaaagggg

SEQ ID NO: 1459 - RNA, 21 nt, synthetic construct
  source 1..21: mol_type = other RNA
aagtcgaagttgcatgtgtcg

SEQ ID NO: 1460 - RNA, 21 nt, synthetic construct
  source 1..21: mol_type = other RNA
tgaagacagttctagggttcc

SEQ ID NO: 1461 - RNA, 21 nt, synthetic construct
  source 1..21: mol_type = other RNA
tcaaatttcccgagtaagcag

SEQ ID NO: 1462 - RNA, 21 nt, synthetic construct
  source 1..21: mol_type = other RNA
ttcaataaatatccaaaccgc

SEQ ID NO: 1463 - RNA, 21 nt, synthetic construct
  source 1..21: mol_type = other RNA
acaataaataccgaggaatgc

SEQ ID NO: 1464 - RNA, 21 nt, synthetic construct
  source 1..21: mol_type = other RNA
tgccttttattcgcgagggtc

SEQ ID NO: 1465 - RNA, 21 nt, synthetic construct
  source 1..21: mol_type = other RNA
taagcacgacacctcgcccct

SEQ ID NO: 1466 - RNA, 21 nt, synthetic construct
  source 1..21: mol_type = other RNA
tcgcgtagaagggcgtctgcc

SEQ ID NO: 1467 - RNA, 21 nt, synthetic construct
  source 1..21: mol_type = other RNA
taataccgaggaatgtcgggg

SEQ ID NO: 1468 - RNA, 21 nt, synthetic construct
  source 1..21: mol_type = other RNA
tagacaataaataccgaggaa

SEQ ID NO: 1469 - RNA, 21 nt, synthetic construct
  source 1..21: mol_type = other RNA
ttcactaccgctacctcgctg

SEQ ID NO: 1470 - RNA, 21 nt, synthetic construct
  source 1..21: mol_type = other RNA
atcctggaaggcgaagtgcag

SEQ ID NO: 1471 - RNA, 21 nt, synthetic construct
  source 1..21: mol_type = other RNA
tcaaaagcaaatttcccgagt

SEQ ID NO: 1472 - RNA, 21 nt, synthetic construct
  source 1..21: mol_type = other RNA
ttttggcaaaagcaaatttcc

SEQ ID NO: 1473 - RNA, 21 nt, synthetic construct
  source 1..21: mol_type = other RNA
aataaatatccaaaccgccga

SEQ ID NO: 1474 - RNA, 21 nt, synthetic construct
  source 1..21: mol_type = other RNA
taataaatatccaaaccgccg

SEQ ID NO: 1475 - RNA, 21 nt, synthetic construct
  source 1..21: mol_type = other RNA
tccaaaacgtggattggggtt

SEQ ID NO: 1476 - RNA, 21 nt, synthetic construct
  source 1..21: mol_type = other RNA
agtgcatccaaaacgtggatc

SEQ ID NO: 1477 - RNA, 21 nt, synthetic construct
  source 1..21: mol_type = other RNA
ttctcagtgcatccaaaacgt

SEQ ID NO: 1478 - RNA, 21 nt, synthetic construct
  source 1..21: mol_type = other RNA
tgtctcagtgcatccaaaacg

SEQ ID NO: 1479 - RNA, 21 nt, synthetic construct
  source 1..21: mol_type = other RNA
agacaataaataccgaggaat

SEQ ID NO: 1480 - RNA, 21 nt, synthetic construct
  source 1..21: mol_type = other RNA
tacagacaataaataccgagg

SEQ ID NO: 1481 - RNA, 21 nt, synthetic construct
  source 1..21: mol_type = other RNA
tgacagacaataaataccgag

SEQ ID NO: 1482 - RNA, 21 nt, synthetic construct
  source 1..21: mol_type = other RNA
tctaggtggggacagacaatc

SEQ ID NO: 1483 - RNA, 21 nt, synthetic construct
  source 1..21: mol_type = other RNA
tagacaataaataccgaggac

SEQ ID NO: 1484 - RNA, 21 nt, synthetic construct
  source 1..21: mol_type = other RNA
tcttcagcatgtcccacttgt

SEQ ID NO: 1485 - RNA, 21 nt, synthetic construct
  source 1..21: mol_type = other RNA
ttcttcagcatgtcccacttg

SEQ ID NO: 1486 - RNA, 21 nt, synthetic construct
  source 1..21: mol_type = other RNA
aggtagttctcatcctggaag

SEQ ID NO: 1487 - RNA, 21 nt, synthetic construct
  source 1..21: mol_type = other RNA
acaggtagttctcatcctgga

SEQ ID NO: 1488 - RNA, 21 nt, synthetic construct
  source 1..21: mol_type = other RNA
tgtacaggtagttctcatcct

SEQ ID NO: 1489 - RNA, 21 nt, synthetic construct
  source 1..21: mol_type = other RNA
tccatgaccaggtacaggtag

SEQ ID NO: 1490 - RNA, 21 nt, synthetic construct
  source 1..21: mol_type = other RNA
tccaaacttgctcagcagtgt

SEQ ID NO: 1491 - RNA, 21 nt, synthetic construct
  source 1..21: mol_type = other RNA
ttgttcatgatcttcatggca

SEQ ID NO: 1492 - RNA, 21 nt, synthetic construct
  source 1..21: mol_type = other RNA
acttgttcatgatcttcatgg

SEQ ID NO: 1493 - RNA, 21 nt, synthetic construct
  source 1..21: mol_type = other RNA
tacttgttcatgatcttcatg

SEQ ID NO: 1494 - RNA, 21 nt, synthetic construct
  source 1..21: mol_type = other RNA
acttgctcagcagtgtcagca

SEQ ID NO: 1495 - RNA, 21 nt, synthetic construct
  source 1..21: mol_type = other RNA
taaacttgctcagcagtgtca

SEQ ID NO: 1496 - RNA, 21 nt, synthetic construct
  source 1..21: mol_type = other RNA
tgatgttgtcgggtttgatgc

SEQ ID NO: 1497 - RNA, 21 nt, synthetic construct
  source 1..21: mol_type = other RNA
tcaggatgttgtcgggtttgc

SEQ ID NO: 1498 - RNA, 21 nt, synthetic construct
  source 1..21: mol_type = other RNA
tccttgtagtggacgatcttg

SEQ ID NO: 1499 - RNA, 21 nt, synthetic construct
  source 1..21: mol_type = other RNA
agagagaggtgctccttgtag

SEQ ID NO: 1500 - RNA, 21 nt, synthetic construct
  source 1..21: mol_type = other RNA
aaagaagaagggatgtgtccg

SEQ ID NO: 1501 - RNA, 21 nt, synthetic construct
  source 1..21: mol_type = other RNA
tcaaagaagaagggatgtgtc

SEQ ID NO: 1502 - RNA, 21 nt, synthetic construct
  source 1..21: mol_type = other RNA
tttcgaaatccggtgtaaagg

SEQ ID NO: 1503 - RNA, 21 nt, synthetic construct
  source 1..21: mol_type = other RNA
tcaccttcgaaatccggtgta

SEQ ID NO: 1504 - RNA, 21 nt, synthetic construct
  source 1..21: mol_type = other RNA
tcgaagttgcatgtgtcggtg

SEQ ID NO: 1505 - RNA, 21 nt, synthetic construct
  source 1..21: mol_type = other RNA
agtcgaagttgcatgtgtcgg

SEQ ID NO: 1506 - RNA, 21 nt, synthetic construct
  source 1..21: mol_type = other RNA
taccaagtcgaagttgcatgt

SEQ ID NO: 1507 - RNA, 21 nt, synthetic construct
  source 1..21: mol_type = other RNA
tcgtaatactccatgaccagg

SEQ ID NO: 1508 - RNA, 21 nt, synthetic construct
  source 1..21: mol_type = other RNA
ttcgaagacagttctagggtt

SEQ ID NO: 1509 - RNA, 22 nt, synthetic construct
  source 1..22: mol_type = other RNA
tcgtaatactccatggaccagg

SEQ ID NO: 1510 - RNA, 20 nt, synthetic construct
  source 1..20: mol_type = other RNA
cgtaatactccatgaccagg

SEQ ID NO: 1511 - RNA, 21 nt, synthetic construct
  modified_base 19: mod_base = i
  source 1..21: mol_type = other RNA
ggatgaaacagctgaagtnga

SEQ ID NO: 1512 - RNA, 21 nt, synthetic construct
  source 1..21: mol_type = other RNA
tccctgaaccctagaactgta

SEQ ID NO: 1513 - RNA, 21 nt, synthetic construct
  modified_base 20: mod_base = i
  source 1..21: mol_type = other RNA
gaaccctagaactgtcttcna

SEQ ID NO: 1514 - RNA, 21 nt, synthetic construct
  modified_base 19: mod_base = i
  source 1..21: mol_type = other RNA
gaccctagaactgtcttcnaa

SEQ ID NO: 1515 - RNA, 21 nt, synthetic construct
  modified_base 18: mod_base = i
  source 1..21: mol_type = other RNA
accctagaactgtcttcnact

SEQ ID NO: 1516 - RNA, 21 nt, synthetic construct
  modified_base 17: mod_base = i
  source 1..21: mol_type = other RNA
ccctagaactgtcttcnacta

SEQ ID NO: 1517 - RNA, 21 nt, synthetic construct
  source 1..21: mol_type = other RNA
tgcttactcgggaaatttgct

SEQ ID NO: 1518 - RNA, 21 nt, synthetic construct
  modified_base 17: mod_base = i
  source 1..21: mol_type = other RNA
cgggaaatttgcttttnccaa

SEQ ID NO: 1519 - RNA, 21 nt, synthetic construct
  source 1..21: mol_type = other RNA
accccaatccacgttttggat

SEQ ID NO: 1520 - RNA, 21 nt, synthetic construct
  modified_base 17: mod_base = i
  source 1..21: mol_type = other RNA
cccaatccacgttttgnatga

SEQ ID NO: 1521 - RNA, 21 nt, synthetic construct
  modified_base 16: mod_base = i
  source 1..21: mol_type = other RNA
gagggacgtgttggtnaatga

SEQ ID NO: 1522 - RNA, 21 nt, synthetic construct
  modified_base 16: mod_base = i
  source 1..21: mol_type = other RNA
ggatgagaactacctntacct

SEQ ID NO: 1523 - RNA, 21 nt, synthetic construct
  source 1..21: mol_type = other RNA
cctggtcatggagtattacgt

SEQ ID NO: 1524 - RNA, 21 nt, synthetic construct
  source 1..21: mol_type = other RNA
ggacatcaaacccgacaacat

SEQ ID NO: 1525 - RNA, 21 nt, synthetic construct
  source 1..21: mol_type = other RNA
tggcaagatcgtccactacaa

SEQ ID NO: 1526 - RNA, 21 nt, synthetic construct
  source 1..21: mol_type = other RNA
cccctttacaccggatttcga

SEQ ID NO: 1527 - RNA, 21 nt, synthetic construct
  modified_base 17: mod_base = i
  source 1..21: mol_type = other RNA
cgacacatgcaacttcnactt

SEQ ID NO: 1528 - RNA, 21 nt, synthetic construct
  source 1..21: mol_type = other RNA
ggaaccctagaactgtcttca

SEQ ID NO: 1529 - RNA, 21 nt, synthetic construct
  source 1..21: mol_type = other RNA
ggaaccctagaactgttttca

SEQ ID NO: 1530 - RNA, 21 nt, synthetic construct
  source 1..21: mol_type = other RNA
ctgcttactcgggaaatttga

SEQ ID NO: 1531 - RNA, 21 nt, synthetic construct
  modified_base 10: mod_base = OTHER; note = 2-aminoadenine nucleotide
  source 1..21: mol_type = other RNA
gcggtttggntatttattgaa

SEQ ID NO: 1532 - RNA, 21 nt, synthetic construct
  source 1..21: mol_type = other RNA
gcattcctcggtatttattgt

SEQ ID NO: 1533 - RNA, 21 nt, synthetic construct
  modified_base 17: mod_base = OTHER; note = 2-aminoadenine nucleotide
  source 1..21: mol_type = other RNA
gcattcctcggtatttnttgt

SEQ ID NO: 1534 - RNA, 21 nt, synthetic construct
  modified_base 19: mod_base = i
  source 1..21: mol_type = other RNA
gaccctcgcgaataaaagnca

SEQ ID NO: 1535 - RNA, 22 nt, synthetic construct
  source 1..22: mol_type = other RNA
aggggcgaggtgtcgtgcttat

SEQ ID NO: 1536 - RNA, 22 nt, synthetic construct
  source 1..22: mol_type = other RNA
ggcagacgcccttctacgcgat

SEQ ID NO: 1537 - RNA, 22 nt, synthetic construct
  source 1..22: mol_type = other RNA
ggcagacccccttctacgcgat

SEQ ID NO: 1538 - RNA, 22 nt, synthetic construct
  source 1..22: mol_type = other RNA
ccccgacattcctcggtattat

SEQ ID NO: 1539 - RNA, 22 nt, synthetic construct
  source 1..22: mol_type = other RNA
ttcctcggtatttattgtctat

SEQ ID NO: 1540 - RNA, 21 nt, synthetic construct
  source 1..21: mol_type = other RNA
gcgaggtagcggtagtgaatt

SEQ ID NO: 1541 - RNA, 21 nt, synthetic construct
  source 1..21: mol_type = other RNA
aggggcgaggtgtcgtgctta

SEQ ID NO: 1542 - RNA, 21 nt, synthetic construct
  source 1..21: mol_type = other RNA
ccccgacattcctcggtatta

SEQ ID NO: 1543 - RNA, 21 nt, synthetic construct
  source 1..21: mol_type = other RNA
ttcctcggtatttattgtcta

SEQ ID NO: 1544 - RNA, 21 nt, synthetic construct
  source 1..21: mol_type = other RNA
actcgggaaatttgcttttga

SEQ ID NO: 1545 - RNA, 21 nt, synthetic construct
  source 1..21: mol_type = other RNA
ggaaatttgcttttgtcaaaa

SEQ ID NO: 1546 - RNA, 21 nt, synthetic construct
  modified_base 19: mod_base = OTHER; note = 2-aminoadenine nucleotide
  source 1..21: mol_type = other RNA
tcggcggtttggatatttntt

SEQ ID NO: 1547 - RNA, 21 nt, synthetic construct
  modified_base 18: mod_base = OTHER; note = 2-aminoadenine nucleotide
  source 1..21: mol_type = other RNA
cggcggtttggatatttntta

SEQ ID NO: 1548 - RNA, 21 nt, synthetic construct
  source 1..21: mol_type = other RNA
aaccccaatccacgttttgga

SEQ ID NO: 1549 - RNA, 21 nt, synthetic construct
  modified_base 17: mod_base = i
  source 1..21: mol_type = other RNA
gatccacgttttggatncact

SEQ ID NO: 1550 - RNA, 21 nt, synthetic construct
  modified_base 17: mod_base = i
  source 1..21: mol_type = other RNA
acgttttggatgcactnagaa

SEQ ID NO: 1551 - RNA, 21 nt, synthetic construct
  modified_base 16: mod_base = i
  source 1..21: mol_type = other RNA
cgttttggatgcactnagaca

SEQ ID NO: 1552 - RNA, 21 nt, synthetic construct
  source 1..21: mol_type = other RNA
attcctcggtatttattgtct

SEQ ID NO: 1553 - RNA, 21 nt, synthetic construct
  source 1..21: mol_type = other RNA
cctcggtatttattgtttgta

SEQ ID NO: 1554 - RNA, 22 nt, synthetic construct
  source 1..22: mol_type = other RNA
gcattcctcggtatttattgtt

SEQ ID NO: 1555 - RNA, 22 nt, synthetic construct
  source 1..22: mol_type = other RNA
cctggtcatggagtattacgtt

SEQ ID NO: 1556 - RNA, 22 nt, synthetic construct
  source 1..22: mol_type = other RNA
gtcctcggtatttattgtctat

SEQ ID NO: 1557 - RNA, 22 nt, synthetic construct
  modified_base 17: mod_base = i
  source 1..22: mol_type = other RNA
acaagtgggacatgctnaagat

SEQ ID NO: 1558 - RNA, 22 nt, synthetic construct
  modified_base 16: mod_base = i
  source 1..22: mol_type = other RNA
caagtgggacatgctnaagaat

SEQ ID NO: 1559 - RNA, 22 nt, synthetic construct
  source 1..22: mol_type = other RNA
cttccaggatgagaactacttt

SEQ ID NO: 1560 - RNA, 22 nt, synthetic construct
  source 1..22: mol_type = other RNA
cttccaggatgagaactatctt

SEQ ID NO: 1561 - RNA, 22 nt, synthetic construct
  modified_base 20: mod_base = i
  source 1..22: mol_type = other RNA
tccaggatgagaactacctntt

SEQ ID NO: 1562 - RNA, 22 nt, synthetic construct
  source 1..22: mol_type = other RNA
tccaggatgagaactacttgtt

SEQ ID NO: 1563 - RNA, 22 nt, synthetic construct
  modified_base 17: mod_base = i
  source 1..22: mol_type = other RNA
aggatgagaactacctntacat

SEQ ID NO: 1564 - RNA, 22 nt, synthetic construct
  modified_base 19: mod_base = i
  source 1..22: mol_type = other RNA
ctacctgtacctggtcatngat

SEQ ID NO: 1565 - RNA, 22 nt, synthetic construct
  source 1..22: mol_type = other RNA
ctacctgtacctggttatggat

SEQ ID NO: 1566 - RNA, 22 nt, synthetic construct
  modified_base 19: mod_base = i
  source 1..22: mol_type = other RNA
acactgctgagcaagtttngat

SEQ ID NO: 1567 - RNA, 21 nt, synthetic construct
  source 1..21: mol_type = other RNA
ctacaaggagcacctctttct

SEQ ID NO: 1568 - RNA, 21 nt, synthetic construct
  source 1..21: mol_type = other RNA
ctacaaggagcacctttctct

SEQ ID NO: 1569 - RNA, 21 nt, synthetic construct
  source 1..21: mol_type = other RNA
cggacacatcccttcttcttt

SEQ ID NO: 1570 - RNA, 21 nt, synthetic construct
  source 1..21: mol_type = other RNA
gacacatcccttcttctttga

SEQ ID NO: 1571 - RNA, 21 nt, synthetic construct
  source 1..21: mol_type = other RNA
cctttacaccggatttcgaaa

SEQ ID NO: 1572 - RNA, 21 nt, synthetic construct
  modified_base 18: mod_base = i
  source 1..21: mol_type = other RNA
tacaccggatttcgaagntga

SEQ ID NO: 1573 - RNA, 21 nt, synthetic construct
  modified_base 20: mod_base = i
  source 1..21: mol_type = other RNA
caccgacacatgcaacttcna

SEQ ID NO: 1574 - RNA, 21 nt, synthetic construct
  modified_base 18: mod_base = i
  source 1..21: mol_type = other RNA
ccgacacatgcaacttcnact

SEQ ID NO: 1575 - RNA, 21 nt, synthetic construct
  modified_base 18: mod_base = i
  source 1..21: mol_type = other RNA
acatgcaacttcgacttngta

SEQ ID NO: 1576 - RNA, 22 nt, synthetic construct
  source 1..22: mol_type = other RNA
cctcggtatttattgtttgtat

SEQ ID NO: 1577 - RNA, 22 nt, synthetic construct
  source 1..22: mol_type = other RNA
cctcggtatttattgtctgtat

SEQ ID NO: 1578 - RNA, 22 nt, synthetic construct
  modified_base 19: mod_base = i
  source 1..22: mol_type = other RNA
cctcggtatttattgtctntat

SEQ ID NO: 1579 - RNA, 21 nt, synthetic construct
  source 1..21: mol_type = other RNA
cctggtcatggagtattacga

SEQ ID NO: 1580 - RNA, 19 nt, synthetic construct
  source 1..19: mol_type = other RNA
ccctagaactgtcttcgaa

SEQ ID NO: 1581 - RNA, 22 nt, synthetic construct
  modified_base 19: mod_base = i
  source 1..22: mol_type = other RNA
gaccctagaactgtcttcnaat

SEQ ID NO: 1582 - RNA, 22 nt, synthetic construct
  modified_base 20: mod_base = i
  source 1..22: mol_type = other RNA
gaaccctagaactgtcttcnat

SEQ ID NO: 1583 - RNA, 22 nt, synthetic construct
  source 1..22: mol_type = other RNA
cctggtcatggagtattacgat

SEQ ID NO: 1584 - RNA, 20 nt, synthetic construct
  source 1..20: mol_type = other RNA
ccctagaactgtcttcgaat

SEQ ID NO: 1585 - RNA, 22 nt, synthetic construct
  source 1..22: mol_type = other RNA
ttcctcggtatttattgtctaa

SEQ ID NO: 1586 - RNA, 23 nt, synthetic construct
  source 1..23: mol_type = other RNA
cctgggtcatggagtattacgat

SEQ ID NO: 1587 - RNA, 21 nt, synthetic construct
  source 1..21: mol_type = other RNA
ctggtcatggagtattacgat

SEQ ID NO: 1588 - RNA, 21 nt, synthetic construct
  source 1..21: mol_type = other RNA
ggcagacgcccttctacgcga

SEQ ID NO: 1589 - RNA, 21 nt, synthetic construct
  source 1..21: mol_type = other RNA
ggcagacccccttctacgcga

SEQ ID NO: 1590 - RNA, 19 nt, synthetic construct
  source 1..19: mol_type = other RNA
gcgaggtagcggtagtgaa

SEQ ID NO: 1591 - RNA, 21 nt, synthetic construct
  source 1..21: mol_type = other RNA
gtcctcggtatttattgtcta

SEQ ID NO: 1592 - RNA, 21 nt, synthetic construct
  modified_base 17: mod_base = i
  source 1..21: mol_type = other RNA
acaagtgggacatgctnaaga

SEQ ID NO: 1593 - RNA, 21 nt, synthetic construct
  modified_base 16: mod_base = i
  source 1..21: mol_type = other RNA
caagtgggacatgctnaagaa

SEQ ID NO: 1594 - RNA, 21 nt, synthetic construct
  source 1..21: mol_type = other RNA
cttccaggatgagaactactt

SEQ ID NO: 1595 - RNA, 21 nt, synthetic construct
  source 1..21: mol_type = other RNA
cttccaggatgagaactatct

SEQ ID NO: 1596 - RNA, 21 nt, synthetic construct
  modified_base 20: mod_base = i
  source 1..21: mol_type = other RNA
tccaggatgagaactacctnt

SEQ ID NO: 1597 - RNA, 21 nt, synthetic construct
  source 1..21: mol_type = other RNA
tccaggatgagaactacttgt

SEQ ID NO: 1598 - RNA, 21 nt, synthetic construct
  modified_base 17: mod_base = i
  source 1..21: mol_type = other RNA
aggatgagaactacctntaca

SEQ ID NO: 1599 - RNA, 21 nt, synthetic construct
  modified_base 19: mod_base = i
  source 1..21: mol_type = other RNA
ctacctgtacctggtcatnga

SEQ ID NO: 1600 - RNA, 21 nt, synthetic construct
  source 1..21: mol_type = other RNA
ctacctgtacctggttatgga

SEQ ID NO: 1601 - RNA, 21 nt, synthetic construct
  modified_base 19: mod_base = i
  source 1..21: mol_type = other RNA
acactgctgagcaagtttnga

SEQ ID NO: 1602 - RNA, 21 nt, synthetic construct
  source 1..21: mol_type = other RNA
cctcggtatttattgtctgta

SEQ ID NO: 1603 - RNA, 21 nt, synthetic construct
  modified_base 19: mod_base = i
  source 1..21: mol_type = other RNA
cctcggtatttattgtctnta

SEQ ID NO: 1604 - RNA, 22 nt, synthetic construct
  source 1..22: mol_type = other RNA
cctgggtcatggagtattacga

SEQ ID NO: 1605 - RNA, 20 nt, synthetic construct
  source 1..20: mol_type = other RNA
ctggtcatggagtattacga

SEQ ID NO: 1606 - RNA, 21 nt, synthetic construct
  source 1..21: mol_type = other RNA
ggacatcaaacccgataacat

SEQ ID NO: 1607 - RNA, 21 nt, synthetic construct
  source 1..21: mol_type = other RNA
tggcaagatcgtccattacaa

SEQ ID NO: 1608 - RNA, 21 nt, synthetic construct
  source 1..21: mol_type = other RNA
gcacttcgccttccaggattt

SEQ ID NO: 1609 - RNA, 21 nt, synthetic construct
  source 1..21: mol_type = other RNA
cagcgaggtagcggtagtgaa

SEQ ID NO: 1610 - RNA, 21 nt, synthetic construct
  source 1..21: mol_type = other RNA
ctgcacttcgccttccaggat

SEQ ID NO: 1611 - RNA, 21 nt, synthetic construct
  modified_base 18: mod_base = i
  source 1..21: mol_type = other RNA
ctcggtatttattgtctntca

SEQ ID NO: 1612 - RNA, 21 nt, synthetic construct
  source 1..21: mol_type = other RNA
gattgtctgtccccatctaga

SEQ ID NO: 1613 - RNA, 21 nt, synthetic construct
  source 1..21: mol_type = other RNA
tgccatgaagatcatgaacaa

SEQ ID NO: 1614 - RNA, 21 nt, synthetic construct
  source 1..21: mol_type = other RNA
ccatgaagatcatgaacaagt

SEQ ID NO: 1615 - RNA, 21 nt, synthetic construct
  source 1..21: mol_type = other RNA
catgaagatcatgaacaagta

SEQ ID NO: 1616 - RNA, 21 nt, synthetic construct
  modified_base 16: mod_base = i
  source 1..21: mol_type = other RNA
tgctgacactgctgancaagt

SEQ ID NO: 1617 - RNA, 21 nt, synthetic construct
  source 1..21: mol_type = other RNA
tgacactgctgagcaagttta

SEQ ID NO: 1618 - RNA, 21 nt, synthetic construct
  source 1..21: mol_type = other RNA
gcatcaaacccgacaacatca

SEQ ID NO: 1619 - RNA, 21 nt, synthetic construct
  modified_base 20: mod_base = i
  source 1..21: mol_type = other RNA
gcaaacccgacaacatcctna

SEQ ID NO: 1620 - RNA, 21 nt, synthetic construct
  source 1..21: mol_type = other RNA
gcaaacccgacaacatcttga

SEQ ID NO: 1621 - RNA, 21 nt, synthetic construct
  modified_base 19: mod_base = i
  source 1..21: mol_type = other RNA
caagatcgtccactacaanga

SEQ ID NO: 1622 - RNA, 21 nt, synthetic construct
  source 1..21: mol_type = other RNA
caccgacacatgcaactttga

SEQ ID NO: 1623 - RNA, 21 nt, synthetic construct
  source 1..21: mol_type = other RNA
tagacaataaataccgaggaa